(19) United States
(12) Patent Application Publication
(10) Pub. No.: US 2023/0038520 A1
(43) Pub. Date: Feb. 9, 2023

(54) THERAPEUTIC ADENO-ASSOCIATED VIRUS COMPRISING LIVER-SPECIFIC PROMOTERS FOR TREATING POMPE DISEASE AND LYSOSOMAL DISORDERS

(71) Applicant: ASKLEPIOS BIOPHARMACEUTICAL, INC., Research Triangle Park, NC (US)

(72) Inventors: Michael ROBERTS, Research Triangle Park, NC (US); Juan Manuel IGLESIAS, Research Triangle Park, NC (US); Anna TRETIAKOVA, Research Triangle Park, NC (US); Michael W. O'CALLAGHAN, Research Triangle Park (US); Achille FRANCOIS, Research Triangle Park, NC (US)

(73) Assignee: ASKLEPIOS BIOPHARMACEUTICAL, INC., Research Triangle Park, NC (US)

(21) Appl. No.: 17/778,175

(22) PCT Filed: Nov. 19, 2020
(86) PCT No.: PCT/US2020/061223

§ 371 Date: May 19, 2022

Related U.S. Application Data
(60) Provisional application No. 63/023,570, filed on May 12, 2020.
(60) Provisional application No. 62/937,556, filed on Nov. 19, 2019.
(60) Provisional application No. 62/937,583, filed on Nov. 19, 2019.

(51) Int. Cl. C12N 15/86; C12N 9/26; C07K 14/62

(52) U.S. Cl. CPC C12N 15/86; C12N 9/2408; C12Y 302/0102; C07K 14/62; C07K 2319/02; C12N 2750/14143; C12N 2830/38; C12N 2830/42

(57) ABSTRACT

Recombinant AAV (rAAV) vectors comprising a rAVV genome comprising a heterologous nucleic acid encoding a lysosomal protein, e.g., acid alpha-glucosidase (GAA) polypeptide, and optionally a signal peptide and/or optionally a targeting sequence, e.g., IGF2 targeting peptide, operatively linked to a liver-specific promoter (LSP), enabling the GAA polypeptide to be secreted from the liver and targeted to the lysosomes. Particular embodiments relate to a recombinant AAV (rAAV) vector encoding an alpha-glucosidase (GAA) polypeptide, having a liver secretory signal peptide and a IGF2 targeting peptide that binds human cation-independent mannose-6-phosphate receptor (CI-MPR) or to the IGF2 receptor, permitting proper subcellular localization of the GAA polypeptide to lysosomes. Also encompassed are cells, and methods to treat a lysosomal disease, for example, a glycogen storage disease type II (GSD II) disease and/or Pompe Disease with the rAAV vector.

### SEQUENCE LISTING

[0001] This invention claims benefit under 35 U.S.C. § 119(e) of U.S. Provisional Application 62/937,556 filed on Nov. 19, 2019, and U.S. Provisional Application 62/937,583 filed on Nov. 19, 2019, and U.S. Provisional Application 63/023,570 filed on May 12, 2020, the contents of each are incorporated herein in their entirety by reference.

### SEQUENCE LISTING

[0002] The instant application contains a Sequence Listing which has been submitted electronically in ASCII format, and is hereby incorporated by reference in its entirety. Said ASCII copy, created on Nov. 17, 2020, is named 046192-096600WOPT SL.txt and is 840,179 bytes in size.

### FIELD OF THE INVENTION

[0003] The present invention relates to adeno-associated virus (AAV) particles, virions and vectors for targeted translocation of lysosomal enzymes, such as, e.g., an alpha-glucosidase (GAA) polypeptide, and method of use for the treatment of lysosomal storage diseases and disorders, such as, e.g., Pompe disease.

### BACKGROUND

[0004] More than forty lysosomal storage diseases (LSDs) are caused, directly or indirectly, by the absence of one or more lysosomal enzymes in the lysosome Enzyme replacement therapy for LSDs is being actively pursued. Therapy generally requires that LSD proteins be taken up and delivered to the lysosomes of a variety of cell types in an M6P-dependent fashion. One possible approach involves purifying an LSD protein and modifying it to incorporate a carbohydrate moiety with M6P. This modified material may be taken up by the cells more efficiently than unmodified LSD proteins due to interaction with M6P receptors on the cell surface.

[0005] As an alternative or adjunct to enzyme therapy, the feasibility of gene therapy approaches to treat GSD-II have been investigated (Amalfitano, A., et al., (1999) Proc. Natl. Acad. Sci. USA 96:8861-8866, Ding, E., et al. (2002) Mol. Ther. 5:436-446, Fraites, T. J., et al., (2002) Mol. Ther. 5:571-578, Tsujino, S., et al. (1998) Hum. Gene Ther. 9:1609-1616).

[0006] However, viral or AAV delivery of genes, in particular lysosomal proteins and enzymes for treatment of lysosomal storage diseases has challenges. Normally, mammalian lysosomal enzymes are synthesized in the cytosol and traverse the ER where they are glycosylated with N-linked, high mannose type carbohydrate. In the Golgi, the high mannose carbohydrate is modified on lysosomal proteins by the addition of mannose-6-phosphate (M6P) which targets these proteins to the lysosome. The M6P-modified proteins are delivered to the lysosome via interaction with either of two M6P receptors. However, recombinantly produced proteins used in enzyme replacement therapy often lack the addition of the M6P which is required for targeting them to the lysosomes, therefore, often requiring high doses of recombinantly produced enzymes to be administered to a patient and/or frequent infusions.

[0007] Acid alpha-glucosidase (GAA) is a lysosomal enzyme that hydrolyzes the alpha 1-4 linkage in maltose and other linear oligosaccharides, including the outer branches of glycogen, thereby breaking down excess glycogen in the lysosome (Hirschhorn et al. (2001) in The Metabolic and Molecular Basis of Inherited Disease, Scriver, et al., eds. (2001), McGraw-Hill: New York, p. 3389-3420). Like other mammalian lysosomal enzymes, GAA is synthesized in the cytosol and traverses the ER where it is glycosylated with N-linked, high mannose type carbohydrate. In the Golgi, the high mannose carbohydrate is modified on lysosomal proteins by the addition of mannose-6-phosphate (M6P) which targets these proteins to the lysosome. The M6P-modified proteins are delivered to the lysosome via interaction with either of two M6P receptors. The most favorable form of modification is when two M6Ps are added to a high mannose carbohydrate.

[0008] Insufficient GAA activity in the lysosome results in Pompe disease, a disease also known as acid maltase deficiency (AMD), glycogen storage disease type II (GSDII), glycogenosis type II, or GAA deficiency. The diminished enzymatic activity occurs due to a variety of missense and nonsense mutations in the gene encoding GAA. Consequently, glycogen accumulates in the lysosomes of all cells in patients with Pompe disease. In particular, glycogen accumulation is most pronounced in lysosomes of cardiac and skeletal muscle, liver, and other tissues. Accumulated glycogen ultimately impairs muscle function. In the most severe form of Pompe disease, death occurs before two years of age due to cardio-respiratory failure.

[0009] There is a need for an effective treatment of Pompe disease. Enzyme replacement therapeutics for Pompe require a recombinant GAA protein to be administered and taken up by muscle and liver cells in the subject where it is subsequently transported to the lysosomes in those cells in a M6P-dependent fashion. However, while enzyme therapy has demonstrated reasonable efficacy for severe infantile GSD II, the benefit of GAA enzyme therapy is limited by the need for frequent infusions as well as the subject developing inhibitor or neutralizing antibodies against recombinant hGAA protein (Amalfitano, A., et al. (2001) Genet. In Med. 3:132-138).

[0010] Gene therapy has the potential to not only cure genetic disorders, but to also facilitate the long-term non-invasive treatment of acquired and degenerative disease using a virus. One gene therapy vector is adeno-associated virus (AAV). AAV itself is a non-pathogenic-dependent parvovirus that needs helper viruses for efficient replication. AAV has been utilized as a virus vector for gene therapy because of its safety and simplicity. AAV has a broad host and cell type tropism capable of transducing both dividing and non-dividing cells.

[0011] However, AAV delivery of the GAA polypeptide has some challenges with respect to achieving sufficient expression in the liver and/or delivery to lysosomes with patients reporting to experience glycaemia.

In particular, in human subjects, the administration of rAAV vectors encoding GAA polypeptide have resulted in a number of patients experiencing hypoglycemia or becoming hyperglycemic due to non-specific update in cells (see, e.g., Byrne et al., A study on the safety and efficacy of Reveglucosidease alfa in patients with late-onset Pompe disease; Orphanet J. of Rare diseases; 2017; 12: 144).

[0012] Accordingly, there is a need in the art for improved methods of producing lysosomal polypeptides such as GAA in vitro and in vivo, for example, to treat lysosomal polypeptide deficiencies, including modifications of GAA. Moreover, there is a need for improved secretion from the liver as well as improved targeting of GAA to the lysosomes to help reduce any side effects from overexpression of the GAA polypeptide, and reducing the risk of hypoglycemia. Further, there is a need for methods that result in systemic delivery of GAA and other lysosomal polypeptides to affected tissues and organs. In particular, there remains a need for more efficient methods for administering GAA protein to subjects and targeting GAA protein to patient lysosomes, while reducing any potential side effects.

### SUMMARY OF THE INVENTION

[0013] The technology described herein relates generally to gene therapy constructs, methods and composition, for the treatment lysosomal storage diseases and disorders, such as, for example but not limited to, Pompe Disease. More particularly, the technology relates to adeno-associated (AAV) virions configured for delivering a lysosomal enzyme, e.g., a GAA polypeptide to a subject, and more particularly for delivering a lysosomal enzyme, e.g., a GAA polypeptide to the liver of a subject where it is targeted to the lysosomes and secreted from the liver cells.

[0014] In particular, described herein are targeted viral vectors, e.g., using rAAV vectors as an exemplary example, that comprise a nucleotide sequence containing inverted terminal repeats (ITRs), a promoter, a heterologous gene, a poly-A tail and potentially other regulator elements for use to treat a lysosomal storage disease, such as those listed in Table 5A or Table 6A herein, wherein the heterologous gene is a lysosomal enzyme, such as, e.g., GAA, and wherein the vector, e.g., rAAV can be administered to a patient in a therapeutically effective dose that is delivered to the appropriate tissue and/or organ for expression of the heterologous lysosomal enzyme gene and treatment of the disease, e.g., Pompe disease.

[0015] Aspects of the present invention teach certain benefits in construction and use which give rise to the exemplary advantages described below.

[0016] Accordingly, in particular embodiments described herein are rAAV vectors that comprises a nucleotide sequence containing inverted terminal repeats (ITRs) and located between the ITRs, a liver specific promoter (LSP), a heterologous nucleic acid sequence that encodes the acid alpha-glucosidase (GAA) protein, a poly-A tail and potentially other regulator elements for use to treat Pompe Disease, and wherein the rAAV expressing GAA protein can be administered to a patient in a therapeutically effective dose that is delivered to the appropriate tissue and/or organ for expression of the heterologous gene encoding the GAA protein for the treatment of a subject with Pompe disease.

[0017] More specifically, the AAV virion or genome comprises a LSP selected from any promoter listed in Table 4 herein, or a functional variant or functional fragment thereof, or any LSP selected from SEQ ID NO: 86, 91-96, or 146-150 or a functional variant or functional fragment thereof, that enables the lysosomal protein, e.g., GAA protein to be preferentially expressed in the liver. In some embodiments, the liver-specific promoter, while preferentially expresses the hGAA protein in the liver, can also express the hGAA to some extent in another tissue of interest, e.g., the muscle, or CNS, or muscle and CNS tissues. In some embodiments, the expressed lysosomal enzyme, e.g., GAA protein can be configured as GAA-fusion protein with a targeting sequence, such as a IGF2 targeting peptide as disclosed herein that targets the GAA protein to lysosomes, and/or fused with a signal peptide (SP), the GAA protein is expressed by the rAAV genome in the liver, where it is secreted and taken up by lysosomes of mammalian cells, in particular muscle cells.

[0018] In some embodiments of the compositions and methods described herein, the rAAV vector disclosed herein comprises, in its genome: 5′ and 3′ AAV inverted terminal repeats (ITR) sequences, and located between the 5′ and 3′ ITRs, a liver specific promoter (LSP) operatively linked to a heterologous nucleic acid sequence encoding an alpha-glucosidase (GAA) polypeptide, wherein the liver-specific promoter (LSP) comprises a nucleic acid sequence selected from any promoter listed from SEQ ID NOS: 86 (CRM 0412), SEQ ID NO: 91 (SP0412) or SEQ ID NO: 92 (SP0422), SEQ ID NOS: 93 (SP0239), SEQ ID NO: 94 (SP0265, also referred to SP131_A1), SEQ ID NO: 95 (SP0240) or SEQ ID NO: 96 (SP0246), or SEQ ID NO: 146 (SP0265-UTR), SEQ ID NO: 147 (SP0239-UTR), SEQ ID NO: 148 (SP0240-UTR), SEQ ID NO: 149 (SP0246-UTR) or SEQ ID NO: 150 (SP0131-A1-UTR) or a functional fragment or variant thereof, or any LSP selected from SEQ ID NO: 270-341 or 342-430, or a functional fragment or variant thereof. In some embodiments, the GAA polypeptide is not fused to either a IGF2 targeting sequence, or signal sequence. In some embodiments, the GAA polypeptide is fused to a signal sequence as disclosed herein, and/or a IGF2 targeting sequence as disclosed herein.

[0019] In some embodiments of the compositions and methods described herein, the rAAV vector disclosed herein comprises, in its genome: 5′ and 3′ AAV inverted terminal repeats (ITR) sequences, and located between the 5′ and 3′ ITRs, a liver specific promoter (LSP) operatively linked to a heterologous nucleic acid sequence encoding a fusion polypeptide comprising (i) a secretory signal peptide, and/or an IGF2 targeting peptide; and (ii) an alpha-glucosidase (GAA) polypeptide, wherein the liver-specific promoter (LSP) is selected from any promoter listed in Table 4 herein, or a functional variant or functional fragment thereof, or any LSP selected from SEQ ID NO: 86, 91-96, or 146-150 or a functional variant or functional fragment thereof.

[0020] In some embodiments, the rAAV vector disclosed herein comprises, in its genome: 5′ and 3′ AAV inverted terminal repeats (ITR) sequences, and located between the 5′ and 3′ ITRs, a heterologous nucleic acid sequence encoding a fusion polypeptide comprising (i) a secretory signal peptide (also referred to as a leader peptide), and (ii) an alpha-glucosidase (GAA) polypeptide, wherein the heterologous nucleic acid is operatively linked to a liver-specific promoter (LSP) selected from any promoter listed in Table 4 herein, or a functional variant or functional fragment thereof, or any LSP selected from SEQ ID NO: 86, 91-96, or 146-150, or a functional variant or functional fragment thereof or any LSP selected from Table 4 herein, or a functional variant or functional fragment thereof. Exemplary leader sequences include, but are not limited to the innate GAA leader sequence, AAT sequence, IL2(1-3), IL2 leader sequence (IL2 wt), a modified IL2 leader sequence (IL2 mut), fibronectin (FN1) signal sequence, or IgG leader sequence or functional variants thereof, as disclosed herein. In some embodiments, the AAV vector comprises a Kozak sequence located between the LSP and the leader sequence.

[0021] In some embodiments, the rAAV vector disclosed herein comprises, in its genome: 5′ and 3′ AAV inverted terminal repeats (ITR) sequences, and located between the 5′ and 3′ ITRs, a heterologous nucleic acid sequence encoding a fusion polypeptide comprising (i) an IGF2 targeting peptide, and (ii) an alpha-glucosidase (GAA) polypeptide, wherein the heterologous nucleic acid is operatively linked to a liver-specific promoter (LSP) selected from any promoter listed in Table 4 herein, or a functional variant or functional fragment thereof, or any LSP selected from SEQ ID NO: 86, 91-96, or 146-150 or a functional variant or functional fragment thereof.

[0022] In a further embodiments, the rAAV vector disclosed herein comprises, in its genome: 5′ and 3′ AAV inverted terminal repeats (ITR) sequences, and located between the 5′ and 3′ ITRs, a heterologous nucleic acid sequence encoding an alpha-glucosidase (GAA) polypeptide (i.e., where the GAA polypeptide not fused to a heterologous signal peptide (or a leader sequence), or not fused to an IGF2 targeting sequence as described herein), wherein the heterologous nucleic acid is operatively linked to a liver-specific promoter (LSP) selected from any promoter listed in Table 4 herein, or a functional variant or functional fragment thereof, or any LSP selected from SEQ ID NO: 86, 91-96, or 146-150 or a functional variant or functional fragment thereof.

[0023] In some embodiments, the rAAV vector comprises a liver specific capsid, e.g., a liver specific capsid selected from XL32 and XL32.1, as disclosed in WO2019/241324, which is incorporated herein in its entirety by reference. In some embodiments, the rAAV vector is a AAVXL32 or AAVXL32.1 as disclosed in WO2019/241324, which is incorporated herein in its entirety by reference, or a AAV8 vector, or a haploid AAV vector comprising at least one AAV8 capsid protein (e.g., at least one of VP1, VP2, or VP3 is from the AAV8 serotype), and in some embodiments, the AAV vector is a haploid AAV vector comprising at least two AAV8 capsid proteins). In some embodiments, the AAV vector comprises a capsid disclosed in WO2019241324A1, or International Patent application PCT/US2019/036676, which are incorporated herein in their entirety by reference. In some embodiments, the AAV vector comprises a capsid which is encoded by a nucleic acid AAV capsid coding sequence that is at least 90% identical to a nucleotide sequence of any one of SEQ ID NOs: 1-3 as disclosed in WO2019241324A1; or (b) a nucleotide sequence encoding any one of SEQ ID NOS:4-6 as disclosed in WO2019241324A1. In some embodiments, an AAV capsid comprises an amino acid sequence at least 90% identical to any one of SEQ ID NOS:4-6 as disclosed in WO2019241324A1, along with AAV particles comprising an AAV vector genome and the AAV capsid of the invention.

[0024] In some embodiments, the rAAV vector comprises capsid proteins such that the AAV vector transduces liver cells, and in some embodiments the rAAV vector comprises the rAAV vector comprises capsid proteins such that the AAV vector transduces muscle and liver cells.

[0025] An exemplary LSP encompassed for use in the methods and compositions is SP0412 (SEQ ID NO: 91) or a functional variant thereof. In alternative embodiments, a LSP can be selected from any of SEQ ID NOS: 86 (CRM 0412), SEQ ID NO: 91 (SP0412) or SEQ ID NO: 92 (SP0422), SEQ ID NOs: 93 (SP0239), SEQ ID NO: 94 (SP0265, also referred to SP131_A1), SEQ ID NO: 95 (SP0240) or SEQ ID NO: 96 (SP0246), or SEQ ID NO: 146 (SP0265-UTR), SEQ ID NO: 147 (SP0239-UTR), SEQ ID NO: 148 (SP0240-UTR), SEQ ID NO: 149 (SP0246-UTR) or SEQ ID NO: 150 (SP0131-A1-UTR), or functional fragments or variants thereof.

[0026] In some embodiments of the compositions and methods described herein, the secretory signal peptide is selected from any of: AAT signal peptide, a fibronectin signal peptide (FN1), a GAA signal peptide, innate GAA leader sequence, AAT sequence, IL2(1-3), IL2 leader sequence (IL2 wt), a modified IL2 leader sequence (IL2 mut), or IgG leader sequence or functional variants thereof having secretory signal activity.

[0027] In some embodiments of the compositions and methods described herein, the alpha-glucosidase (GAA) polypeptide is linked to the IGF2 targeting peptide at the N-terminal end of a GAA polypeptide. In some embodiments, the IGF2 targeting peptide is linked to the N-terminal at amino acid 70 of human acid alpha-glucosidase (GAA) polypeptide (SEQ ID NO: 10) (i.e., linked to the N-terminal of residues 70-952 of human acid alpha-glucosidase (GAA) polypeptide), or a GAA polypeptide at least 85% sequence identity to amino acids 70-952 of SEQ ID NO: 10. In alternative embodiments, the IGF2 targeting peptide is linked to the N-terminal at amino acid 40 of human acid alpha-glucosidase (GAA) polypeptide (SEQ ID NO: 10) (i.e., linked to the N-terminal of residues 40-952 of human acid alpha-glucosidase (GAA) polypeptide)), or a GAA polypeptide at least 85% sequence identity to amino acids 40-952 of SEQ ID NO: 10. In some embodiments of the compositions and methods described herein, the GAA polypeptide is encoded by the wild-type GAA nucleic acid sequence (e.g., SEQ ID NO: 11 or SEQ ID NO: 72), or can be a codon optimized GAA nucleic acid sequence, e.g., for any one of increasing expression in vivo, reducing CpG islands and/or reducing innate immune response in a subject. Exemplary codon optimized GAA nucleic acid sequences include, but are not limited to SEQ ID NO; 73, SEQ ID NO: 74, SEQ ID NO: 75, SEQ ID NO: 76 and SEQ ID NO: 182.

[0028] In some embodiments of the methods and compositions disclosed herein, the recombinant AAV vector comprises a liver-specific promoter (LSP), for example but not limited to, a liver specific promoter is selected from any in Table 4 herein or functional variants thereof, or functional variants thereof. Exemplary LSP encompassed for use in the methods and compositions include SP0412 and functional variants thereof. In alternative embodiments, a LSP can comprise a nucleic acid sequence selected from any of SP0422, SP0131A1, SP0239, SP0240 or SP0246, or a functional variant thereof as disclosed herein. For Example, the liver specific promoter can comprise a nucleic acid sequence selected from any of SEQ ID NOS: 86 (CRM 0412), SEQ ID NO: 91 (SP0412) or SEQ ID NO: 92 (SP0422), or a functional variant or functional fragment thereof. In alternative embodiments, the liver specific promoter can comprise a nucleic acid sequence selected from any of SEQ ID NOs: 93 (SP0239), SEQ ID NO: 94 (SP0265 also called SP131_A1), SEQ ID NO: 95 (SP0240) or SEQ ID NO: 96 (SP0246), or SEQ ID NO: 146 (SP0265-UTR), SEQ ID NO: 147 (SP0239-UTR), SEQ ID NO: 148 (SP0240-UTR), SEQ ID NO: 149 (SP0246-UTR), or SEQ ID NO: 150 (SP0131-A1-UTR). In some embodiments of the compositions and methods disclosed herein, a liver-specific promoter, includes a liver-specific cis-regulatory element (CRE), a synthetic liver-specific cis-regulatory module (CRM) or a synthetic liver-specific promoter comprising a promoter sequence selected from any of SEQ ID NOs: 270-341 (minimal LSP, which can include a CRM) or SEQ ID NO: 342-430 (exemplary synthetic LSP), or a functional fragment or functional variant thereof, as previously disclosed in Tables 4A or 4B of provisional application 62,937,556, which is encompassed in its entirety by reference herein. These liver-specific promoter elements can include minimal liver-specific promoters (see, e.g., SEQ ID NO: 86, 270-341 or liver-specific proximal promoters (see, e.g., SEQ ID Nos: 91-96, 146-150 and 342-430). For Example, SEQ ID NOs: 86 (CRM 0412), SEQ ID NO: 91 (SP0412) or SEQ ID NO: 92 (SP0422), or a functional variant or functional fragment thereof.

[0029] In some embodiments of the methods and compositions disclosed herein, the recombinant AAV vector comprises a liver-specific promoter (LSP), for example but not limited to, a liver specific promoter is selected from any of SEQ ID NOs: 86, 91-96, 146-150, 370-430 or a functional variant or functional fragment thereof.

[0030] For example, a functional variant or a functional fragment of a liver-specific promoter disclosed in Table 4 herein, or any LSP selected from SEQ ID NO: 86, 91-96, or 146-150, or 370-430 or a functional variant or functional fragment thereof has at least about 75% sequence identity to, or at least about 80% sequence identity to, at least about 90% sequence identity to, at least about 95% sequence identity to, at least about 98% sequence identity to the original unmodified reference sequence, and also at least 35% of the promoter activity, or at least about 45% of the promoter activity, or at least about 50% of the promoter activity, or at least about 60% of the promoter activity, or at least about 75% of the promoter activity, or at least about 80% of the promoter activity, or at least about 85% of the promoter activity, or at least about 90% of the promoter activity, or at least about 95% of the promoter activity of the corresponding unmodified promoter sequence.

[0031] For example, a functional variant or a functional fragment of SEQ ID NO: 92 (SP0422) or SEQ ID NO: 91 (SP0412) has at least about 75% sequence identity to SEQ ID NO: 92 or SEQ ID NO: 91, or at least about 80% sequence identity to SEQ ID NO: 92 or SEQ ID NO: 91, at least about 90% sequence identity to SEQ ID NO: 92 or SEQ ID NO: 91, at least about 95% sequence identity to SEQ ID NO: 92 or SEQ ID NO: 91, at least about 98% sequence identity to SEQ ID NO: 92 or SEQ ID NO: 91, or the original unmodified sequence, and also at least 35% of the promoter activity, or at least about 45% of the promoter activity, or at least about 50% of the promoter activity, or at least about 60% of the promoter activity, or at least about 75% of the promoter activity, or at least about 80% of the promoter activity, or at least about 85% of the promoter activity, or at least about 90% of the promoter activity, or at least about 95% of the promoter activity of the corresponding unmodified promoter sequence of SEQ ID NO: 92 or SEQ ID NO: 91, respectively.

[0032] A functional fragment is a portion of the promoter that has at least 35%, or at least about 45%, or at least about 50%, or at least about 75%, or at least about 80%, or at least about 85%, or at least about 90% of the untrunkated promoter. In some embodiments, a functional fragment comprises a contiguous portion of the unmodified promoter sequence. While TTR (SEQ ID NO: 431) is disclosed in the Examples herein as an exemplary LSP, one of ordinary skill in the art can replace the TTR promoter (SEQ ID NO: 431) with any one or more of the liver-specific promoter listed in Table 4 herein, for example, a nucleic acid sequence comprising at least SEQ ID NO: 92 (SP0422) or SEQ ID NO: 91 (SP0412) or a functional variant or fragment of SEQ ID NO: 92 (SP0422) or SEQ ID NO: 91 (SP0412), or a nucleic acid sequence comprising any of SEQ ID NOs: 93 (SP0239), SEQ ID NO: 94 (SP131_A1), SEQ ID NO: 95 (SP0240), SEQ ID NO: 96 (SP0246), or SEQ ID NO: 146 (SP0265-UTR), SEQ ID NO: 147 (SP0239-UTR), SEQ ID NO: 148 (SP0240-UTR), SEQ ID NO: 149 (SP0246-UTR) or SEQ ID NO: 150 (SP0131-A1-UTR), or any sequence selected from SEQ ID NO: 270-341 or 342-430, or a functional variant or functional fragment thereof. In some embodiments, the LSP, while preferentially expresses the hGAA protein in the liver, can also express the hGAA to some extent in another tissue of interest, e.g., the muscle, or CNS, or muscle and CNS tissues.

[0033] In some embodiments of the methods and compositions disclosed herein, a recombinant AAV vector comprises a heterologous nucleic acid sequence that encodes a wild-type GAA polypeptide (wtGAA) or a modified GAA polypeptide, as disclosed herein, where one or more amino acids of the GAA polypeptide is modified, e.g., H199R, R223H, H201L modifications. In some embodiments of the methods and compositions disclosed herein, a recombinant AAV vector comprises a heterologous nucleic acid sequence encoding the GAA polypeptide that is the human GAA gene or a human codon optimized GAA gene (coGAA) or a modified GAA nucleic acid sequence that is codon optimized that encodes a modified GAA polypeptide comprising one or more of the modifications selected from: H199R, R223H, H201L. In all aspects of the methods and compositions as disclosed herein, a nucleic acid sequence encoding the GAA polypeptide is codon optimized for any one or more of: enhanced expression in vivo, to reduce CpG islands, or to reduce the innate immune response. In all aspects of the methods and compositions as disclosed herein, a nucleic acid sequence encoding the GAA polypeptide is codon optimized to reduce CpG islands and to reduce the innate immune response. In some embodiments, the nucleic acid sequence encoding the wild type GAA polypeptide comprises modifications as disclosed in SEQ ID NO: 182, and described herein.

[0034] Another aspect of the technology herein relates to a pharmaceutical composition comprising any of the recombinant AAV vector compositions disclosed herein, and a pharmaceutically acceptable carrier.

[0035] Another aspect of the technology herein relates to a composition comprising a nucleic acid sequence comprising in the following order: a 5′ ITR, a liver specific promoter (LSP) operatively linked to a nucleic acid sequence comprising a nucleic acid encoding a modified GAA polypeptide comprising one or more of the modifications selected from: H199R, R223H, H201L, and a 3′ ITR. In one aspect the nucleic acid sequence optionally further comprises a nucleic acid sequence encoding a leader sequence (or signal sequence) located between the LSP and the nucleic acid encoding the GAA polypeptide, where the leader sequence is selected from any of: the innate GAA leader sequence, AAT sequence, IL2(1-3), IL2 leader sequence (IL2 wt), a modified IL2 leader sequence (IL2 mut), fibronectin (FN1), or IgG leader sequence or functional variants thereof, as disclosed herein. In some embodiments, the nucleic acid sequence optionally further comprises a kozak sequence located between the LSP and the leader sequence. In some embodiments, the nucleic acid sequence optionally further comprises am IGF2 targeting peptide located between the leader sequence and the nucleic acid encoding the GAA polypeptide. In some embodiments, the nucleic acid sequence optionally further comprises a 3′ UTR located 3′ of the nucleic acid encoding the GAA polypeptide and the poly A sequence. In some embodiments, the nucleic acid sequence optionally further comprises an intron sequence 3′ of the LSP and 5′ of the nucleic acid encoding the GAA polypeptide, preferably between the LSP and the kozak sequence. Exemplary constructs for the rAAV vector or rAAV genome are shown in FIGS. 5A-5G.

[0036] Another aspect of the technology herein relates to a composition comprising a nucleic acid sequence comprising a 5′ ITR, a liver specific promoter (LSP) operatively linked to a nucleic acid sequence encoding a modified GAA polypeptide comprising one or more of the modifications selected from: H199R, R223H, H201L, a polyA sequence and a 3′ ITR sequence, where the poly A sequence can be a full length or truncated polyA signal sequence. Another aspect of the technology herein relates to a composition comprising a nucleic acid sequence comprising a 5′ ITR, a liver specific promoter (LSP) operatively linked to a nucleic acid sequence encoding a modified GAA polypeptide comprising one or more of the modifications selected from: H199R, R223H, H201L, a full-length polyA sequence, a terminal repeat sequence and a 3′ ITR sequence, where the nucleic acid lacks a AAV P5 promoter sequence.

[0037] Another aspect of the technology herein relates to a composition comprising a nucleic acid sequence comprising: a liver specific promoter (LSP) operatively linked to a nucleic acid sequence comprising, in the following order: (a) a nucleic acid encoding a secretory signal peptide, (b) a nucleic acid encoding a IGF2 targeting peptide, and (c) a nucleic acid encoding a GAA polypeptide.

[0038] Another aspect of the technology herein relates to a composition comprising a nucleic acid sequence for a recombinant adenovirus associated (rAAV) vector genome, the nucleic acid sequence comprising: (a) a 5′ and a 3′ AAV inverted terminal repeats (ITR) nucleic acid sequences, and (b) located between the 5′ and 3′ ITR sequence, a heterologous nucleic acid sequence encoding a polypeptide comprising a secretory signal peptide and an alpha-glucosidase (GAA) polypeptide, wherein the heterologous nucleic acid is operatively linked to a liver-specific promoter as described above. An exemplary liver-specific promoter is SP0412 or SP0422 or a functional variant thereof. In some embodiments, a liver-specific promoter for use in the methods and compositions as disclosed herein includes a liver-specific cis-regulatory element (CRE), a synthetic liver-specific cis-regulatory module (CRM) or a synthetic liver-specific promoter as disclosed in Table 4 herein.

[0039] In some embodiments of the methods and compositions disclosed herein, the nucleic acid sequence comprises a heterologous nucleic acid sequence encoding a GAA polypeptide, where the nucleic acid sequence is a human GAA gene or a human codon optimized GAA gene (coGAA) or a modified GAA nucleic acid sequence. In some embodiments of the methods and compositions disclosed herein, the nucleic acid sequence comprises a heterologous nucleic acid sequence that is a codon optimized (coGAA) GAA gene, for any one or more of enhanced expression in vivo, to reduce CpG islands or to reduce the innate immune response. In some embodiments of the methods and compositions disclosed herein, the nucleic acid sequence comprises a heterologous nucleic acid sequence that is a codon optimized (coGAA) GAA gene to reduce CpG islands and to reduce the innate immune response.

[0040] In some embodiments of the methods and compositions disclosed herein, the nucleic acid sequence comprises a heterologous nucleic acid sequence encoding a GAA polypeptide selected from any of SEQ ID NO: 11 (full length hGAA), SEQ ID NO: 55 (Dwight cDNA), SEQ ID NO: 56 (hGAA Δ1-66) or SEQ ID NO: 182 (modGAA, H199R, R223H), or a nucleic acid sequence encoding a GAA polypeptide having the amino acid sequence of SEQ ID NO: 170 (modGAA; H199R, R223H), SEQ ID NO: 171 (modGAA; H199R, R223H, H201L), or a nucleic acid sequence encoding a GAA polypeptide that is at least about 75%, or 80%, or 85%, or 90%, or 95%, or 98%, or 99% sequence identity to any of SEQ ID NOs: 11, 55, 56 or 182.

[0041] In some embodiments of the methods and compositions disclosed herein, the nucleic acid sequence comprises a heterologous nucleic acid sequence encoding the GAA polypeptide, where the nucleic acid encoding the GAA polypeptide is selected from any of SEQ ID NO: 74 (codon optimized 1), SEQ ID NO: 75 (codon optimized 2), and SEQ ID NO: 76 (codon optimized 3), or SEQ ID NO: 182 (modGAA, H199R, R223H), or a nucleic acid sequence at least about 75%, or 80%, or 85%, or 90%, or 95%, or 98%, or 99% sequence identity to any of SEQ ID NOs: 74, 75, 76 or 182.

[0042] Another aspect of the technology herein relates to use of the rAAV and nucleic acid compositions disclosed herein in a method to treat a disease. In particular, one aspect of the technology herein relates to use of the rAAV vector compositions and nucleic acid compositions disclosed herein, in a method to treat a subject with a glycogen storage disease type II (GSD II, Pompe Disease, Acid Maltase Deficiency) or having a deficiency in alpha-glucosidase (GAA) polypeptide, the method comprising administering any of the recombinant AAV vector, or the rAAV genome or the nucleic acid sequence disclosed herein to the subject. In some embodiments of the methods disclosed herein, the expressed GAA polypeptide is secreted from the subject's liver and there is uptake of the secreted GAA by skeletal muscle tissue, cardiac muscle tissue, diaphragm muscle tissue or a combination thereof, wherein uptake of the secreted GAA results in a reduction in lysosomal glycogen stores in the tissue(s). In some embodiments in the disclosed methods, the recombinant AAV vector, or the rAAV genome or the nucleic acid sequence is administered to the subject by any suitable administration method, for example, but not limited to, an administration method selected from any of: intramuscular, sub-cutaneous, intraspinal, intracisternal, intrathecal, intravenous administration. In some embodiments, the pharmaceutical composition disclosed herein can be used in the methods disclosed herein.

[0043] Another aspect of the technology herein relates to a cell comprising any one or more of a rAAV composition, a rAAV genome composition, or a nucleic acid composition as disclosed herein. In some embodiments, the cell is a human cell, or a non-human cell mammalian cell, or an insect cell.

[0044] Another aspect of the technology herein relates to host animal comprising any one or more of a rAAV composition, a rAAV genome composition, or a nucleic acid composition as disclosed herein. In some embodiments, the host animal is a mammal, a non-human mammal or a human.

[0045] Another aspect of the technology herein relates to host animal comprising at least one cell that comprises any one or more of a rAAV composition, a rAAV genome composition, or a nucleic acid composition as disclosed herein. In some embodiments, the host animal comprising such a modified cell is a mammal, a non-human mammal or a human.

[0046] In some embodiments, disclosed herein is a pharmaceutical formulation comprising an rAAV vectors, nucleic acid encoding a rAAV genome as disclosed herein, and a pharmaceutically acceptable carrier.

[0047] Aspects of the present invention teach certain benefits in construction and use which give rise to the exemplary advantages described below. Other features and advantages of aspects of the present invention will become apparent from the following more detailed description, taken in conjunction with the accompanying drawings, which illustrate, by way of example, the principles of aspects of the invention.

### BRIEF DESCRIPTION OF THE DRAWINGS

[0048] This application file contains at least one drawing executed in color. Copies of this patent application publication with color drawings will be provided by the Office upon request and payment of the necessary fee. The accompanying drawings illustrate aspects of the present invention. In such drawings:

[0049] FIG. 1 is a graph illustrating a y-axis of vector genomes per diploid genome and an x-axis of different AAV serotypes AAV3b, AAV3ST, AAV8, and AAV9, as measured in whole blood, in accordance with at least one embodiment.

[0050] FIG. 2 is a graph illustrating a y-axis of vector genomes per diploid genome and an x-axis of different AAV serotypes AAV3b, AAV3ST, AAV8, and AAV9, as measured in left, median and right liver lobes, in accordance with at least one embodiment.

[0051] FIGS. 3A-3B are exemplary plasmids for production of rAAV vectors useful in the methods and compositions as disclosed herein. FIG. 3A is an illustration of a plasmid map of pAAV-LSPhGAA plasmid for production of a rAAV vector in a producer cell line, e.g., a pro-10 cell line, in accordance with at least one embodiment, where the plasmid comprises a 5′ ITR, LSP, hGAA nucleic acid sequence, 3′ UTR, polyA sequence, and 3′ ITR, where the ITRs are from AAV2. FIG. 3B shows a more detailed map of the illustration of the plasmid map of FIG. 3A.

[0052] FIGS. 4A-4G are illustrations of exemplary nucleic acid constructs for a rAAV genome as disclosed herein that have a targeting peptide, using hGAA as the exemplary lysosomal protein being expressed. FIG. 4A shows a nucleic acid construct for a rAAV genome, comprising a 5′ ITR, a Liver specific promoter (LSP), operatively linked to a heterologous nucleic acid encoding a secretory signal peptide (SS), a targeting peptide (TP) and a human GAA (hGAA) polypeptide, and a 3′ ITR. FIG. 4B shows an exemplary nucleic acid construct for a rAAV genome as disclosed herein, comprising the same elements as FIG. 4A, and additionally comprising at least one polyA signal 3′ of the hGAA polypeptide and 5′ of the 3′-ITR. FIG. 4C shows an exemplary nucleic acid construct for a rAAV genome as disclosed herein, comprising the same elements as FIG. 4B, except comprising with an intron sequence 3′ of the promoter. FIG. 4D shows an exemplary nucleic acid construct for a rAAV genome as disclosed herein, comprising the same elements as FIG. 4C, except comprising a collagen stability (CS) sequence and/or a 3′ UTR sequence located 3′ of the hGAA polypeptide nucleic acid sequence and before the poly A sequence. FIG. 4E shows an exemplary nucleic acid construct for a rAAV genome as disclosed herein, comprising the same elements as FIG. 4D, except also comprising a nucleic acid encoding a spacer of at least 1 amino acid that is located between the nucleic acid encoding the hGAA polypeptide and the nucleic acid encoding the targeting peptide (TP), e.g., IGF2 targeting peptide. FIG. 4F shows an exemplary nucleic acid construct for a rAAV genome as disclosed herein, comprising the same elements as FIG. 4E, wherein the promoter is a liver promoter, the intron sequence is selected from a MVM or HBB2 intron sequence, the secretory signal peptide is selected from any of FN1 signal peptide (e.g., hFN1, ratFN1), a AAT signal peptide or a hGAA signal peptide; the targeting peptide is a IGF2 targeting peptide as disclosed herein, and the at least polyA sequence is selected from hGHpA or a synPA poly A sequence. FIG. 4G shows an exemplary nucleic acid construct for a rAAV genome as disclosed herein, comprising the same elements as FIG. 4F, except where the IGF2 targeting peptide is a nucleic acid sequence selected from SEQ ID NO: 2 (IGF2 Δ2-7), SEQ ID NO: 3 (IGF2 Δ1-7), or SEQ ID NO: 4 (IGF2 V43M).

[0053] FIG. 5A-5G shows an exemplary nucleic acid constructs for a rAAV genome. FIG. 5A is a schematic of exemplary rAAV genome comprising a 5′ ITR, a liver specific promoter, operatively linked to a nucleic acid encoding a hGAA polypeptide, a polyA sequence (e.g., any one or more of hGHpA, synPA, RBG or SV40 polyA sequences) and a 3′ ITR. FIG. 5B is a schematic of an exemplary rAAV genome comprising a 5′ ITR, a liver specific promoter, operatively linked to a nucleic acid encoding a signal secretory peptide (e.g., selected from any of FN1, AAT or cognate GAA signal peptide, IL2, mutIL2, IgG), a nucleic acid encoding a human GAA polypeptide and a polyA sequence and a 3′ ITR. FIG. 5C is a schematic of an exemplary rAAV genome comprising a 5′ ITR, a liver specific promoter, operatively linked to an intron sequence (e.g., MVM, SV40 or HBB2 intron sequence), a nucleic acid encoding a signal secretory peptide (e.g., selected from any of FN1, AAT or cognate GAA signal peptide, IL2, mutIL2, IgG), a nucleic acid encoding a human GAA polypeptide and a polyA sequence and a 3′ ITR. FIG. 5D is a schematic of a similar construct to FIG. 5C, which includes a collagen stability (CS) sequence or 3′ UTR located between the 3′ of the nucleic acid encoding GAA and the at least one polyA sequence (e.g., hGHpA and/or synPA polyA sequence). In some embodiments, the construct comprises both a CS sequence and a 3 UTR sequence as disclosed herein. In some embodiments, the CS sequence can be replaced by a 3′ UTR sequence as disclosed herein. In FIGS. 5A-5D, exemplary liver specific promoter can be selected from any of those disclosed in Table 4 herein, and include, but are not limited to SEQ ID NOs 86, 91-96, or 146-150, or a sequence with at least 85% sequence identity to SEQ ID NOs: 86, 91-96, or 146-150. FIG. 5E is a schematic of one embodiment of a AAV vector useful in the methods and compositions as disclosed herein for treating Pompe Disease, comprising, flanked between a 5′ ITR and a 3′ ITR sequence, the nucleic acid comprising in a 5′ to 3′ direction: a LSP promoter, a kozak sequence, a signal sequence (referred to as leader sequence in FIG. 5E), a nucleic acid encoding hGAA and a poly A sequence. In some embodiments, the leader sequence can be selected from any of: innate GAA leader sequence, IL2 leader sequence (IL2 wt), a modified IL2 leader sequence (IL2 mut) or IgG leader sequence or functional variants thereof; and the hGAA sequence can be selected from a consensus hGAA nucleic acid sequence or a hGAA nucleic acid with at least the H201L mutation, or other modifications as disclosed herein (e.g., H199R, R223H). FIG. 5F is a schematic of another embodiment of a AAV vector useful in the methods and compositions as disclosed herein for treating Pompe Disease, comprising in a 5′ to 3′ direction: a liver specific promoter, an intron sequence, a kozak sequence, a signal sequence (also referred to as a leader sequence), an IGF2 targeting peptide sequence (referred to in FIG. 5F as a “GILT”), a nucleic acid encoding hGAA, optionally a 3′ UTR sequence, and a poly A sequence, showing that different embodiments, e.g., the promoter can be selected from any LSP as disclosed herein, e.g., LSP that have different levels of expression, such as a High-expression level LSP (LSP-H), a medium expression level LSP (LSP-M) or low-expressing LSP (LSP-L), the intron sequence can be selected from HBB2, MVM, SV40 and other intron sequences, the leader sequence can be selected from any of: innate GAA leader sequence, AAT sequence (referred to as A1AT in FIG. 5F), IL2(1-3), IL2 leader sequence (IL2 wt), a modified IL2 leader sequence (IL2 mut), fibronectin (FN1, referred to as FBN in FIG. 5F), or IgG leader sequence or functional variants thereof, an IGF2 targeting peptide sequence selected from any of the IGF2 targeting peptides described herein, e.g., WT IGF2 (SEQ ID NO: 1), Δ2-7, V43M (SEQ ID NO: 9), Δ2-7V43M, or functional variants thereof, and a hGAA nucleic acid sequence that is codon optimized as disclosed herein, e.g., C1-10, which can optionally also comprise at least the H201L mutation, and/or other modifications as disclosed herein (e.g., H199R, R223H), and a polyA sequence, selected from, e.g., RBG or SV40 polyA. The LSP designated LSP-H, M-LSP and LSP-L represent liver specific promoters that predominantly and preferentially express hGAA in the liver, but can express hGAA in one or more other tissues, for example, in the muscle. Such LSPs allows for expression in the liver for systemic secretion and uptake by the muscle cells, as well as some expression in the muscle tissues.

[0054] FIG. 5G shows schematic of different embodiments of a AAV vector construct useful in the methods and compositions as disclosed herein for treating Pompe Disease, where construct 1 (top panel) shows a rAAV vector construct comprising in a 5′ to 3′ direction, a 5′ ITR, AAV P5 promoter, liver-specific promoter (LSP), hGAA nucleic acid sequence, truncated polyA sequence (t-pA), and 3′ ITR; and Construct 2 (bottom panel) shows an exemplary rAAV vector construct where the P5 AAV promoter fragment is removed, the construct comprising in a 5′ to 3′ direction, a 5′ ITR, liver-specific promoter (LSP), hGAA nucleic acid sequence, full length polyA sequence (fl-pA), a terminator sequence in the antisense orientation and 3′ ITR (in the sense orientation).

[0055] FIG. 6 shows an illustration of the Gibson cloning technique to generate rAAV genomes as disclosed herein. In particular, a triple ligation is performed to ligate 3 blocks of nucleic acid sequence together, which can then be cloned into a vector with the promoter, e.g., liver specific promoter, and 5′ and 3′ ITRs to generate the rAAV genome. The Gibson cloning methodology was used to generate the following rAAV genomes: SEQ ID NO: 57 (AAT-V43M-wtGAA (delta1-69aa)); SEQ ID NO: 58 (ratFN1-IGF2V43M-wtGAA (delta1-69aa)); SEQ ID NO: 59 (hFN1-IGF2V43M-wtGAA (delta1-69aa)); SEQ ID NO: 60 (AAT-IGF2Δ2-7-wtGAA (delta 1-69)); SEQ ID NO: 61 (FN1rat-IGFΔ2-7-wtGAA (delta 1-69)); SEQ ID NO: 62 (hFN1-IGFΔ2-7-wtGAA (delta 1-69)).

[0056] FIG. 7 shows the generation of an exemplary rAAV genome of SEQ ID NO: 57 comprising AAT-V43M-wtGAA (delta1-69aa)) using Gibson cloning of nucleic acid sequence blocks (1, 2 and 3). One of ordinary skill in the art can readily replace the TTR liver promoter with any of the liver specific promoters disclosed in Table 4 herein, including but not limited to a promoter selected from any of SEQ ID NO: 86, 91-96, 146-150, or a functional variant or functional fragment thereof. Also shown in the AAT-V43M-wtGAA (delta1-69aa)) vector is the location a 3 amino acid (3aa) spacer nucleic acid sequence (showing the exemplary 3aa sequence “G-A-P” as SEQ ID NO: 31) which is located 3′ of the nucleic acid sequence encoding the IGF2(V43M) targeting peptide and 5′ of the nucleic acid encoding wtGAA(A1-69) enzyme, and a stuffer nucleic acid sequence (referred to in FIG. 8. as a “spacer” sequence) which is located 3′ of the polyA sequence and 5′ of the 3′ITR sequence.

[0057] FIG. 8 shows the generation of a rAAV genome of SEQ ID NO: 62 comprising hFN1-IGFΔ2-7-wtGAA (delta 1-69), using Gibson cloning of nucleic acid sequence blocks (8, 2 and 3). One of ordinary skill in the art can readily replace the TTR liver promoter with any of the liver specific promoters disclosed in Table 4 herein, including but not limited to a promoter selected from any of SEQ ID NO: 86, 91-96, 146-150, or a functional variant or functional fragment thereof. Also shown in the hFN1-IGFΔ2-7-wtGAA (delta 1-69) vector is the location a 3 amino acid (3aa) spacer nucleic acid sequence (showing the exemplary 3aa sequence “G-A-P” as SEQ ID NO: 31) which is located 3′ of the nucleic acid sequence encoding the IGFΔ2-7 targeting peptide and 5′ of the nucleic acid encoding wtGAA(A1-69) enzyme, and a stuffer nucleic acid sequence (referred to in FIG. 13. as a “spacer” sequence) which is located 3′ of the polyA sequence and 5′ of the 3′ITR sequence.

[0058] FIGS. 9A-9F shows schematics of exemplary constructs of rAAV genomes expressing wild-type GAA. FIG. 9A shows a schematic of exemplary rAAV genome construct of Candidate 1_AAT_hIGF2-V43M_wtGAA_del1-69_Stuffer.V02 (SEQ ID NO: 79). FIG. 9B shows a schematic of exemplary rAAV genome construct of Candidate 2_FIBrat_hIGF2-V43M_wtGAA_del1-69_Stuffer.V02 (SEQ ID NO: 80). FIG. 9C shows a schematic of exemplary rAAV genome construct of Candidate 3_FIBhum_hIGF2-V43M_wtGAA_del1-69_Stuffer.V02 (SEQ ID NO: 81) FIG. 9D shows a schematic of exemplary rAAV genome construct of Candidate 4_AAT_GILT_wtGAA_del1-69__Stuffer.V02 (SEQ ID NO: 82). FIG. 9E shows a schematic of exemplary rAAV genome construct of Candidate 5_FIBrat_GILT_wtGAA_del1-69_Stuffer.V02 (SEQ ID NO: 83). FIG. 9F shows a schematic of exemplary rAAV genome construct of Candidate 6_FIBhum_GILT_wtGAA_del1-69_Stuffer.V02 (SEQ ID NO: 84). One of ordinary skill in the art can readily replace the TTR liver promoter shown in FIGS. 9A-9F for any LPS, e.g., any liver specific promoters disclosed in Table 4 herein, including but not limited to a promoter selected from any of SEQ ID NO: 86, 91-96, or 146-150. Moreover, TTR promoter can be replaced with a LSP that can express the hGAA polypeptide preferentially in the liver and also in at least one other tissue of interest, e.g., the muscle, or CNS, and in some embodiments, the TTR promoter can be replaced with a LSP that can express the hGAA polypeptide preferentially in the liver and the muscle and CNS tissues. In some embodiments, the expressed lysosomal enzyme, e.g., GAA protein can be configured as GAA-fusion protein with a targeting sequence, such as a IGF2 targeting peptide as disclosed herein that targets the GAA protein to lysosomes, and/or fused with a signal peptide (SP), the GAA protein is expressed by the rAAV genome in the liver, where it is secreted and taken up by lysosomes of mammalian cells, in particular muscle cells.

[0059] As these are exemplary constructs for illustration purposes only, one can also readily substitute the wtGAA sequence with a codon optimized sequence as disclosed herein, or a GAA sequence that has been modified to reduce CpG islands and/or to reduce innate immunity as disclosed herein (see FIG. 11B).

[0060] FIG. 10 shows the mean in vivo luciferase expression in mice driven by exemplary liver-specific promoters SP0244 and SP0239. The expression level is shown as the mean bioluminescence intensity total flux (in photons per second). Error bars are standard error of the mean. When animals are injected with saline only (n=10), no luciferase bioluminescence is detected. When animals are injected with a construct comprising luciferase operably linked to the LP1 promoter (n=9), luciferase bioluminescence is detected. To test the activity of exemplary liver-specific promoters, animals are injected with an equivalent construct comprising luciferase operably inked to the SP0244 promoter (n=8) and the SP0239 promoter (n=10). Promoters SP0244 and SP0239 showed higher luciferase expression in vivo than the control LP1.

[0061] FIGS. 11A-11D shows exemplary modifications to the nucleic acid sequence encoding the GAA polypeptide, and the nucleic acid construct to optimize for GAA protein expression by AAV in vivo. FIG. 11A shows a schematic of the wild type GAA (wtGAA) nucleotide sequence operatively linked to a liver specific promoter as disclosed herein, e.g., a LSP of Table 4, with alternative reading frames shown by the arrows, and three CpG islands. FIG. 11B shows a schematic similar to FIG. 11A that shows in more detail modifications to the nucleic acid sequence encoding GAA to remove the CpG islands. FIG. 11C shows modifications to the wtGAA nucleic acid sequence of SEQ ID NO: 182 that has been modified to (i) reduce the alternative reading frames, (ii) the number of CpG islands and (iii) to include modifications for an optimal Kozak sequence. FIG. 11D is another schematic to show modifications in the nucleic acid sequence encoding the GAA polypeptide to reduce the alternative reading frames, the number of CpG islands and to modifications for an optimal Kozak sequence.

[0062] FIG. 12 shows schematics of exemplary rAAV constructs comprising LSP for expressing GAA under liver specific promoters. The LSP can be selected from any of the liver specific promoters disclosed in Table 4 herein, with or without a stuffer sequence.

[0063] FIGS. 13A-13B show GAA expression from construct comprising liver specific promoters SP0412 and SP0422 in Huh 7 cells and HEPG2 cells. FIG. 13A shows a western blot of GAA expression from construct comprising the liver specific promoter SP0412 (SEQ ID NO: 91) and SP0422 (SEQ ID NO: 92) in Huh 7 cells. FIG. 13A shows that expression of hGAA using promoters 412 (SEQ ID NO: 91) and 422 (SEQ ID NO: 92) leads to significantly higher expression of hGAA in Huh7 cells as compared to the expression using the LP1 promoter (SEQ ID NO: 432) which is referred to as “LSP SS”. FIG. 13B shows a western blot of GAA expression from construct comprising the liver specific promoter SP0412 (SEQ ID NO: 91) and SP0422 (SEQ ID NO: 92) in HEPG2 cells. GAA polypeptide was expressed from rAAV generated using the following plasmids: LSP NEW (SEQ ID NO: 160), 412 NEW (SEQ ID NO: 159), TTR NEW (SEQ ID NO: 155), LSP ss (AAV with LP-1), 412 TTR, 422 Stuffer (SEQ ID NO: 158), 422 TTR, 412 Stuffer (SEQ ID NO: 156). FIG. 13B shows that expression of hGAA using promoters 412 (SEQ ID NO: 91) and 422 (SEQ ID NO: 92) leads to significantly higher expression of hGAA in HepG2 cells as compared to the expression using the LP1 promoter (SEQ ID NO: 432) which is referred to as “LSP SS”.

[0064] The above described figures illustrate aspects of the invention in at least one of its exemplary embodiments, which are further defined in detail in the following description. Features, elements, and aspects of the invention that are referenced by the same numerals in different figures represent the same, equivalent, or similar features, elements, or aspects, in accordance with one or more embodiments.

### DETAILED DESCRIPTION

[0065] The disclosure described herein generally relates to recombinant AAV (rAAV) vectors and constructs for rAAV genomes for gene therapy for delivering a lysosomal protein, such as a GAA polypeptide to a subject. In particular, the technology described herein relates in general to a rAAV vector, or a rAAV genome for producing a lysosomal protein, e.g., GAA polypeptide that is expressed in the liver and effectively targeted to the lysosomes of mammalian cells, for example, human cardiac and skeletal muscle cells. For example, the technology relates to a rAAV vector for transducing liver cells, where the transduced liver cells secrete the GAA polypeptide, and the secreted GAA polypeptide is targeted to lysosomes in skeletal muscle tissue, cardiac muscle tissue, diaphragm muscle tissue or a combination thereof

[0066] Accordingly, one aspect of the technology described herein provides a rAAV vector comprising a rAAV genome that can be used to produce a lysosomal protein, e.g., GAA or modified GAA, that is more effectively secreted from cells, e.g., liver cells, and then targeted to the lysosomes of mammalian cells, for example, human cardiac and skeletal muscle cells.

[0067] In particular, in some embodiments, the lysosomal protein, e.g., GAA polypeptide is expressed by itself. In some embodiments, the lysosomal protein is expressed as a fusion protein comprising at least a signal peptide that promotes secretion of the lysosomal protein, e.g., GAA polypeptide from the liver. In some embodiments, the GAA polypeptide, or modified GAA, is expressed as a fusion protein comprising at least a signal peptide that promotes secretion of the GAA polypeptide from the liver, and also a targeting sequence, that allows effective targeting to lysosomes in mammalian cells, e.g., muscle cells, for example, human cardiac and skeletal muscle cells. In some embodiments, the targeting peptide is a IGF2 targeting peptide a described herein.

[0068] One aspect of the technology described herein relates to a rAAV vector that comprises a nucleotide sequence containing inverted terminal repeats (ITRs), a liver specific promoter, a heterologous gene, a poly-A tail and potentially other regulator elements for use to treat a disease, such as Pompe Disease, and further, for the treatment of Pompe Disease, wherein the heterologous gene is a GAA and wherein the rAAV GAA can be administered to a patient in a therapeutically effective dose that is delivered to the appropriate tissue and/or organ for expression of the heterologous gene and treatment of the disease.

[0069] One aspect of the technology described herein relates to a rAAV vector that comprises in its genome the following in a 5′ to 3′ direction: 5′- and 3′-AAV inverted terminal repeats (ITR) sequences, and located between the 5′ and 3′ ITRs, a heterologous nucleic acid sequence encoding an alpha-glucosidase (GAA) polypeptide, wherein the heterologous nucleic acid is operatively linked to a liver specific promoter, for example, a liver specific promoter disclosed in Table 4 herein, or a functional variant thereof. Another aspect of the technology described herein relates to a rAAV vector that comprises in its genome the following in a 5′ to 3′ direction: 5′- and 3′-AAV inverted terminal repeats (ITR) sequences, and located between the 5′ and 3′ ITRs, a heterologous nucleic acid sequence encoding a secretory signal peptide (SS), a nucleic acid sequence encoding an alpha-glucosidase (GAA) polypeptide, wherein the heterologous nucleic acid is operatively linked to a liver specific promoter, for example, a liver specific promoter disclosed in Table 4 herein, or a functional variant thereof.

[0070] One aspect of the technology described herein relates to a rAAV vector that comprises in its genome the following in a 5′ to 3′ direction: 5′- and 3′-AAV inverted terminal repeats (ITR) sequences, and located between the 5′ and 3′ ITRs, a heterologous nucleic acid sequence encoding a fusion polypeptide comprising (i) a secretory signal peptide (SS), (ii) an IGF2 targeting peptide; and (iii) an alpha-glucosidase (GAA) polypeptide, wherein the heterologous nucleic acid is operatively linked to a liver specific promoter, for example, a liver specific promoter disclosed in Table 4 herein, or a functional variant thereof.

[0071] In all aspects of all embodiments of the technology described herein, the liver specific promoter expresses the lysosomal protein, e.g., hGAA polypeptide preferentially in the liver. In all aspects of all embodiments of the technology described herein, the liver specific promoter expresses the lysosomal protein e.g., hGAA polypeptide preferentially in the liver and at least one other tissue of interest, e.g., the muscle, or CNS, and in some embodiments, the LSP can be replaced with a LSP that can express the hGAA polypeptide preferentially in the liver and the muscle and CNS tissues. In all aspects of all embodiments of the technology described herein, in some embodiments where the AAV vector comprises at least one capsid protein targeting the muscle, the liver specific promoter can be replaced with another promoter, e.g., a muscle promoter.

[0072] In some embodiments of the methods and compositions as disclosed herein, the secretory signal peptide is selected from any of: AAT signal peptide, a fibronectin signal peptide (FN1), a GAA signal peptide, or an active fragment thereof having secretory signal activity.

[0073] In some embodiments, the a rAAV vector described herein is from any serotype. In some embodiments, the rAAV vector is a AAV3b serotype, including, but not limited to, an AAV3b265D virion, an AAV3b265D549A virion, an AAV3b549A virion, an AAV3bQ263Y virion, or an AAV3bSASTG virion (i.e., a virion comprising a AAV3b capsid comprising Q263A/T265 mutations). In some embodiments, the rAAV vector comprises a liver specific capsid, e.g., a liver specific capsid selected from XL32 and XL32.1, as disclosed in WO2019/241324, which is incorporated herein in its entirety by reference. In some embodiments, the rAAV vector is a AAVXL32 or AAVXL32.1 as disclosed in WO2019/241324, which is incorporated herein in its entirety by reference. In some embodiments, the rAAV vector is a rAAV8 vector, or a haploid rAAV vector comprising at least one capsid protein from AAV8 (i.e., any one or more of VP1, VP2 or VP3 is from AAV8 or a chimeric protein thereof). In some embodiments, the AAV vector comprises a capsid disclosed in WO2019241324A 1, or International Patent application PCT/US2019/036676, which are incorporated herein in their entirety by reference. In some embodiments, the AAV vector comprises a capsid which is encoded by a nucleic acid AAV capsid coding sequence that is at least 90% identical to a nucleotide sequence of any one of SEQ ID NOs: 1-3 as disclosed in WO2019241324A1; or (b) a nucleotide sequence encoding any one of SEQ ID NOS:4-6 as disclosed in WO2019241324A1. In some embodiments, an AAV capsid comprises an amino acid sequence at least 90% identical to any one of SEQ ID NOS:4-6 as disclosed in WO2019241324A1, along with AAV particles comprising an AAV vector genome and the AAV capsid of the invention. In some embodiments, the rAAV vector comprises capsid proteins such that the AAV vector transduces liver cells, and in some embodiments the rAAV vector comprises the rAAV vector comprises capsid proteins such that the AAV vector transduces muscle and liver cells. In such embodiments, where the rAAV comprises capsid proteins that enable transduction of muscle cells, the LSP can be replaced with another promoter, e.g., a muscle promoter, or promoter that expresses a protein in liver cells and muscle cells.

### I. Definitions

[0074] The following terms are used in the description herein and the appended claims:

[0075] The terms “a,” “an,” “the” and similar references used in the context of describing the present invention (especially in the context of the following claims) are to be construed to cover both the singular and the plural, unless otherwise indicated herein or clearly contradicted by context. Further, ordinal indicators—such as “first,” “second,” “third,” etc.—for identified elements are used to distinguish between the elements, and do not indicate or imply a required or limited number of such elements, and do not indicate a particular position or order of such elements unless otherwise specifically stated. All methods described herein can be performed in any suitable order unless otherwise indicated herein or otherwise clearly contradicted by context. The use of any and all examples, or exemplary language (e.g., “such as”) provided herein is intended merely to better illuminate the present invention and does not pose a limitation on the scope of the invention otherwise claimed. No language in the present specification should be construed as indicating any non-claimed element essential to the practice of the invention.

[0076] Furthermore, the term “about,” as used herein when referring to a measurable value such as an amount of the length of a polynucleotide or polypeptide sequence, dose, time, temperature, and the like, is meant to encompass variations of ±20%, ±10%, ±5%, ±1%, ±0.5%, or even ±0.1% of the specified amount.

[0077] Also as used herein, “and/or” refers to and encompasses any and all possible combinations of one or more of the associated listed items, as well as the lack of combinations when interpreted in the alternative (“or”).

[0078] As used herein, the transitional phrase “consisting essentially of” means that the scope of a claim is to be interpreted to encompass the specified materials or steps recited in the claim, “and those that do not materially affect the basic and novel characteristic(s)” of the claimed invention. See, In re Herz, 537 F.2d 549, 551-52, 190 USPQ 461,463 (CCPA 1976) (emphasis in the original); see also MPEP § 2111.03. Thus, the term “consisting essentially of” when used in a claim of this invention is not intended to be interpreted to be equivalent to “comprising.” Unless the context indicates otherwise, it is specifically intended that the various features of the invention described herein can be used in any combination.

[0079] Moreover, the present invention also contemplates that in some embodiments of the invention, any feature or combination of features set forth herein can be excluded or omitted.

[0080] To illustrate further, if, for example, the specification indicates that a particular amino acid can be selected from A, G, I, Land/or V, this language also indicates that the amino acid can be selected from any subset of these amino acid(s) for example A, G, I or L; A, G, I or V; A or G; only L; etc. as if each such subcombination is expressly set forth herein. Moreover, such language also indicates that one or more of the specified amino acids can be disclaimed (e.g., by negative proviso). For example, in particular embodiments the amino acid is not A, G or I; is not A; is not G or V; etc. as if each such possible disclaimer is expressly set forth herein.

[0081] The term “parvovirus” as used herein encompasses the family Parvoviridae, including autonomously replicating parvoviruses and dependoviruses. The autonomous parvoviruses include members of the genera Parvovirus, Erythrovirus, Densovirus, Iteravirus, and Contravirus. Exemplary autonomous parvoviruses include, but are not limited to, minute virus of mouse, bovine parvovirus, canine parvovirus, chicken parvovirus, feline panleukopenia virus, feline parvovirus, goose parvovirus, H1 parvovirus, Muscovy duck parvovirus, B19 virus, and any other autonomous parvovirus now known or later discovered. Other autonomous parvoviruses are known to those skilled in the art. See, e.g., BERNARD N. FIELDS et al., VIROLOGY, volume 2, chapter 69 (4th ed., Lippincott-Raven Publishers).

[0082] As used herein, the term “adeno-associated virus” (AAV), includes but is not limited to, AAV type 1, AAV type 2, AAV type 3 (including types 3A and 3B), AAV type 4, AAV type 5, AAV type 6, AAV type 7, AAV type 8, AAV type 9, AAV type 10, AAV type 11, avian AAV, bovine AAV, canine AAV, equine AAV, ovine AAV, and any other AAV now known or later discovered. See, e.g., BERNARD N. FIELDS et al., VIROLOGY, volume 2, chapter 69 (4th ed., Lippincott-Raven Publishers). A number of relatively new AAV serotypes and clades have been identified (see, e.g., Gao et al., (2004) J. Virology 78:6381-6388; Moris et al., (2004) Virology 33-:375-383); and also Table 1 as disclosed in U.S. Provisional Application 62,937,556, filed on Nov. 19, 2019 and Table 1 in International Applications WO2020/102645, and WO2020/102667, each of which is incorporated herein in their entirety.

[0083] The genomic sequences of various serotypes of AAV and the autonomous parvoviruses, as well as the sequences of the native inverted terminal repeats (ITRs), Rep proteins, and capsid subunits are known in the art. Such sequences may be found in the literature or in public databases such as GenBank. See, e.g., GenBank Accession Numbers NC_002077, NC_001401, NC_001729, NC_001863, NC 001829, NC 001862, NC 000883, NC_001701, NC 001510, NC_006152, NC_006261, AF063497, U89790, AF043303, AF028705, AF028704, J02275, J01901, J02275, X01457, AF288061, AH009962, AY028226, AY028223, NC 001358, NC_001540, AF513851, AF513852, AY530579; the disclosures of which are incorporated by reference herein for teaching parvovirus and AAV nucleic acid and amino acid sequences. See also, e.g., Srivistava et al., (1983) J Virology 45:555; Chiarini et al., (1998) J. Virology 71:6823; Chiarini et al., (1999) J. Virology 73:1309; Bantel-Schaal et al., (1999) J. Virology 73:939; Xiao et al., (1999) J. Virology 73:3994; Muramatsu et al., (1996) Virology 221:208; Shade et al., (1986) J. Viral. 58:921; Gao et al., (2002) Proc. Nat. Acad. Sci. USA 99:11854; Morris et al., (2004) Virology 33-:375-383; international patent publications WO 00/28061, WO 99/61601, WO 98/11244; and U.S. Pat. No. 6,156,303; the disclosures of which are incorporated by reference herein for teaching parvovirus and AAV nucleic acid and amino acid sequences. See also Table 1 and Table 5 disclosed in U.S. Pat. No. 62,937,556, filed on Nov. 19, 2019 or Table 1 as disclosed in International Applications WO2020/102645, and WO2020/102667, each of which is incorporated herein in their entirety. The capsid structures of autonomous parvoviruses and AAV are described in more detail in BERNARD N. FIELDS et al., VIROLOGY, volume 2, chapters 69 & 70 (4th ed., Lippincott-Raven Publishers). See also, description of the crystal structure of AAV2 (Xie et al., (2002) Proc. Nat. Acad. Sci. 99:10405-10), AAV4 (Padron et al., (2005) J. Viral. 79: 5047-58), AAV5 (Walters et al., (2004) J. Viral. 78: 3361-71) and CPV (Xie et al., (1996) J Mal. Biol. 6:497-520 and Tsao et al., (1991) Science 251: 1456-64).

[0084] The term “tropism” as used herein refers to preferential entry of the virus into certain cells or tissues, optionally followed by expression (e.g., transcription and, optionally, translation) of a sequence(s) carried by the viral genome in the cell, e.g., for a recombinant virus, expression of a heterologous nucleic acid(s) of interest.

[0085] As used here, “systemic tropism” and “systemic transduction” (and equivalent terms) indicate that the virus capsid or virus vector of the invention exhibits tropism for and/or transduces tissues throughout the body (e.g., brain, lung, skeletal muscle, heart, liver, kidney and/or pancreas). In embodiments of the invention, systemic transduction of the central nervous system (e.g., brain, neuronal cells, etc.) is observed. In other embodiments, systemic transduction of cardiac muscle tissues is achieved.

[0086] As used herein, “selective tropism” or “specific tropism” means delivery of virus vectors to and/or specific transduction of certain target cells and/or certain tissues.

[0087] Unless indicated otherwise, “efficient transduction” or “efficient tropism,” or similar terms, can be determined by reference to a suitable control (e.g., at least about 50%, 60%, 70%, 80%, 85%, 90%, 95%, 100%, 125%, 150%, 175%, 200%, 250%, 300%, 350%, 400%, 500% or more of the transduction or tropism, respectively, of the control). In particular embodiments, the virus vector efficiently transduces or has efficient tropism for liver cells and muscle cells. Suitable controls will depend on a variety of factors including the desired tropism and/or transduction profile.

[0088] Similarly, it can be determined if a virus “does not efficiently transduce” or “does not have efficient tropism” for a target tissue, or similar terms, by reference to a suitable control. In particular embodiments, the virus vector does not efficiently transduce (i.e., has does not have efficient tropism) for kidney, gonads and/or germ cells. In particular embodiments, transduction (e.g., undesirable transduction) of tissue(s) (e.g., kidney) is 20% or less, 10% or less, 5% or less, 1% or less, 0.1% or less of the level of transduction of the desired target tissue(s) (e.g., liver, skeletal muscle, diaphragm muscle, cardiac muscle and/or cells of the central nervous system).

[0089] In some embodiments of this invention, an AAV particle comprising a capsid of this invention can demonstrate multiple phenotypes of efficient transduction of 30 certain tissues/cells and very low levels of transduction (e.g., reduced transduction) for certain tissues/cells, the transduction of which is not desirable.

[0090] As used herein, the term “polypeptide” encompasses both peptides and proteins, unless indicated otherwise.

[0091] A “polynucleotide” is a sequence of nucleotide bases, and may be RNA, DNA or DNA-RNA hybrid sequences (including both naturally occurring and non-naturally occurring nucleotides), but in representative embodiments are either single or double stranded DNA sequences.

[0092] The terms “heterologous nucleotide sequence” and “heterologous nucleic acid molecule” are used interchangeably herein and refer to a nucleic acid sequence that is not naturally occurring in the virus. Generally, the heterologous nucleic acid molecule or heterologous nucleotide sequence comprises an open reading frame that encodes a polypeptide and/or nontranslated RNA of interest (e.g., for delivery to a cell and/or subject).

[0093] A “chimeric nucleic acid” comprises two or more nucleic acid sequences covalently linked together to encode a fusion polypeptide. The nucleic acids may be DNA, RNA, or a hybrid thereof.

[0094] The term “fusion polypeptide” comprises two or more polypeptides covalently linked together, typically by peptide bonding.

[0095] As used herein, an “isolated” polynucleotide (e.g., an “isolated DNA” or an “isolated RNA”) means a polynucleotide at least partially separated from at least some of the other components of the naturally occurring organism or virus, for example; the cell or viral structural components or other polypeptides or nucleic acids commonly found associated with the polynucleotide. In representative embodiments an “isolated” nucleotide is enriched by at least about 10-fold, 100′-fold, 1000-fold, 10,000-fold or more as compared with the starting material.

[0096] Likewise, an “isolated” polypeptide means a polypeptide that is at least partially separated from at least some of the other components of the naturally occurring organism or virus, for example, the cell or viral structural components or other polypeptides or nucleic acids commonly found associated with the polypeptide. In representative embodiments an “isolated” polypeptide is enriched by at least about 10-fold, 100-fold, 1000-fold, 10,000-fold or more as compared with the starting material.

[0097] An “isolated cell” refers to a cell that is separated from other components with which it is normally associated in its natural state. For example, an isolated cell can be a cell in culture medium and/or a cell in a pharmaceutically acceptable carrier of this invention. Thus, an isolated cell can be delivered to and/or introduced into a subject. In some embodiments, an isolated cell can be a cell that is removed from a subject and manipulated as described herein ex vivo and then returned to the subject.

[0098] A population of virions can be generated by any of the methods described herein. In one embodiment, the population is at least 101 virions. In one embodiment, the population is at least 102 virions, at least 103, virions, at least 104 virions, at least 105 virions, at least 106 virions, at least 107 virions, at least 108 virions, at least 109 virions, at least 1010 virions, at least 1011 virions, at least 1012 virions, at least 1013 virions, at least 1014 virions, at least 1015 virions, at least 1016 virions, or at least 1017 virions. A population of virions can be heterogeneous or can be homogeneous (e.g., substantially homogeneous or completely homogeneous).

[0099] A “substantially homogeneous population” as the term is used herein, refers to a population of virions that are mostly identical, with few to no contaminant virions (those that are not identical) therein. A substantially homogeneous population is at least 90% of identical virions (e.g., the desired virion), and can be at least 91%, at least 92%, at least 93%, at least 94%, at least 95%, at least 96%, at least 97%, at least 98%, at least 99%, at least 99.5%, at least 99.9% of identical virions.

[0100] A population of virions that is completely homogeneous contains only identical virions.

[0101] As used herein, by “isolate” or “purify” (or grammatical equivalents) a virus vector or virus particle or population of virus particles, it is meant that the virus vector or virus particle or population of virus particles is at least partially separated from at least some of the other components in the starting material. In representative embodiments an “isolated” or “purified” virus vector or virus particle or population of virus particles is enriched by at least about 10-fold, 100-fold, 1000-fold, 10,000-fold or more as compared with the starting material.

[0102] Unless indicated otherwise, “efficient transduction” or “efficient tropism,” or similar terms, can be determined by reference to a suitable control (e.g., at least about 10%, 15%, 20%, 25%, 30%, 35%, 40%, 45%, 50%, 55%, 60%, 65%, 70%, 75%, 80%, 85%, 90%, 95%, 100%, 125%, 150%, 175%, 200%, 250%, 300%, 350%, 400%, 500% or more of the transduction or tropism, respectively, of the control). In particular embodiments, the virus vector efficiently transduces or has efficient tropism for neuronal cells and cardiomyocytes. Suitable controls will depend on a variety of factors including the desired tropism and/or transduction profile.

[0103] A “therapeutic polypeptide” is a polypeptide that can alleviate, reduce, prevent, delay and/or stabilize symptoms that result from an absence or defect in a protein in a cell or subject and/or is a polypeptide that otherwise confers a benefit to a subject, e.g., enzyme replacement to reduce or eliminate symptoms of a disease, or improvement in transplant survivability or induction of an immune response.

[0104] The terms “heterologous nucleotide sequence” and “heterologous nucleic acid molecule” are used interchangeably herein and refer to a nucleic acid sequence that is not naturally occurring in the virus. Generally, the heterologous nucleic acid molecule or heterologous nucleotide sequence comprises an open reading frame that encodes a polypeptide and/or nontranslated RNA of interest (e.g., for delivery to a cell and/or subject), for example the GAA polypeptide.

[0105] As used herein, the terms “virus vector,” “vector” or “gene delivery vector” refer to a virus (e.g., AAV) particle that functions as a nucleic acid delivery vehicle, and which comprises the vector genome (e.g., viral DNA [vDNA]) packaged within a virion. Alternatively, in some contexts, the term “vector” may be used to refer to the vector genome/vDNA alone.

[0106] An “rAAV vector genome” or “rAAV genome” is an AAV genome (i.e., vDNA) that comprises one or more heterologous nucleic acid sequences. rAAV vectors generally require only the inverted terminal repeat(s) (TR(s)) in cis to generate virus. All other viral sequences are dispensable and may be supplied in trans (Muzyczka, (1992) Curr. Topics Microbial. Immunol. 158:97). Typically, the rAAV vector genome will only retain the one or more TR sequence so as to maximize the size of the transgene that can be efficiently packaged by the vector. The structural and non-structural protein coding sequences may be provided in trans (e.g., from a vector, such as a plasmid, or by stably integrating the sequences into a packaging cell). In embodiments of the invention the rAAV vector genome comprises at least one ITR sequence (e.g., AAV TR sequence), optionally two ITRs (e.g., two AAV TRs), which typically will be at the 5′ and 3′ ends of the vector genome and flank the heterologous nucleic acid, but need not be contiguous thereto. The TRs can be the same or different from each other.

[0107] The term “terminal repeat” or “TR” includes any viral terminal repeat or synthetic sequence that forms a hairpin structure and functions as an inverted terminal repeat (i.e., an ITR that mediates the desired functions such as replication, virus packaging, integration and/or provirus rescue, and the like). The TR can be an AAV TR or a non-AAV TR. For example, a non-AAV TR sequence such as those of other parvoviruses (e.g., canine parvovirus (CPV), mouse parvovirus (MVM), human parvovirus B-19) or any other suitable virus sequence (e.g., the SV40 hairpin that serves as the origin of SV40 replication) can be used as a TR, which can further be modified by truncation, substitution, deletion, insertion and/or addition. Further, the TR can be partially or completely synthetic, such as the “double-D sequence” as described in U.S. Pat. No. 5,478,745 to Samulski et al.

[0108] An “AAV terminal repeat” or “AAV TR,” including an “AAV inverted terminal repeat” or “AAV ITR” may be from any AAV, including but not limited to serotypes 1, 2, 3, 4, 5, 6, 7, 8, 9, 10, 11 or 12 or any other AAV now known or later discovered. An AAV terminal repeat need not have the native terminal repeat sequence (e.g., a native AAV TR or AAV ITR sequence may be altered by insertion, deletion, truncation and/or missense mutations), as long as the terminal repeat mediates the desired functions, e.g., replication, virus packaging, integration, and/or provirus rescue, and the like.

[0109] AAV proteins VP1, VP2 and VP3 are capsid proteins that interact together to form an AAV capsid of an icosahedral symmetry. VP1.5 is an AAV capsid protein described in US Publication No. 2014/0037585.

[0110] The virus vectors of the invention can further be “targeted” virus vectors (e.g., having a directed tropism) and/or a “hybrid” parvovirus (i.e., in which the viral TRs and viral capsid are from different parvoviruses) as described in international patent publication WO 00/28004 and Chao et al., (2000) Molecular Therapy 2:619.

[0111] The virus vectors of the invention can further be duplexed parvovirus particles as described in international patent publication WO 01/92551 (the disclosure of which is incorporated herein by reference in its entirety). Thus, in some embodiments, double stranded (duplex) genomes can be packaged into the virus capsids of the invention.

[0112] Further, the viral capsid or genomic elements can contain other modifications, including insertions, deletions and/or substitutions.

[0113] A “chimeric” capsid protein as used herein means an AAV capsid protein (e.g., any one or more of VP1, VP2 or VP3) that has been modified by substitutions in one or more (e.g., 2, 3, 4, 5, 6, 7, 8, 9, 10, etc.) amino acid residues in the amino acid sequence of the capsid protein relative to wild type, as well as insertions and/or deletions of one or more (e.g., 2, 3, 4, 5, 6, 7, 8, 9, 10, etc.) amino acid residues in the amino acid sequence relative to wild type. In some embodiments, complete or partial domains, functional regions, epitopes, etc., from one AAV serotype can replace the corresponding wild type domain, functional region, epitope, etc. of a different AAV serotype, in any combination, to produce a chimeric capsid protein of this invention. Production of a chimeric capsid protein can be carried out according to protocols well known in the art and a significant number of chimeric capsid proteins are described in the literature as well as herein that can be included in the capsid of this invention.

[0114] As used herein, the term “haploid AAV” shall mean that AAV as described in International Application WO2018/170310, or US Application US2018/037149, which are incorporated herein in their entirety by reference. In some embodiments, a population of virions is a haploid AAV population where a virion particle can be constructed wherein at least one viral protein from the group consisting of AAV capsid proteins, VP1, VP2 and VP3, is different from at least one of the other viral proteins, required to form the virion particle capable of encapsulating an AAV genome. For each viral protein present (VP1, VP2, and/or VP3), that protein is the same type (e.g., all AAV2 VP1). In one instance, at least one of the viral proteins is a chimeric viral protein and at least one of the other two viral proteins is not a chimeric. In one embodiment VP1 and VP2 are chimeric and only VP3 is non-chimeric. For example, only the viral particle composed of VP1/VP2 from the chimeric AAV2/8 (the N-terminus of AAV2 and the C-terminus of AAV8) paired with only VP3 from AAV2; or only the chimeric VP1/VP2 28m-2P3 (the N-terminal from AAV8 and the C-terminal from AAV2 without mutation of VP3 start codon) paired with only VP3 from AAV2. In another embodiment only VP3 is chimeric and VP1 and VP2 are non-chimeric. In another embodiment at least one of the viral proteins is from a completely different serotype. For example, only the chimeric VP1/VP2 28m-2P3 paired with VP3 from only AAV3. In another example, no chimeric is present.

[0115] The term a “hybrid” AAV vector or parvovirus refers to a rAAV vector where the viral TRs or ITRs and viral capsid are from different parvoviruses. Hybrid vectors are described in international patent publication WO 00/28004 and Chao et al., (2000) Molecular Therapy 2:619. For example, a hybrid AAV vector typically comprises the adenovirus 5′ and 3′ cis ITR sequences sufficient for adenovirus replication and packaging (i.e., the adenovirus terminal repeats and PAC sequence).

[0116] The term “polyploid AAV” refers to a AAV vector which is composed of capsids from two or more AAV serotypes, e.g., and can take advantages from individual serotypes for higher transduction but not in certain embodiments eliminate the tropism from the parents.

[0117] The term “GAA” or “GAA polypeptide,” as used herein, encompasses mature (˜76 or ˜67 kDa) and precursor (e.g., ˜ 10 kDa) GAA as well as modified (e.g., truncated or mutated by insertion(s), deletion(s) and/or substitution(s)) GAA proteins or fragments thereof that retain biological function (i.e., have at least one biological activity of the native GAA protein, e.g., can hydrolyze glycogen, as defined above) and GAA variants (e.g., GAA II as described by Kunita et al., (1997) Biochemica et Biophysica Acta 1362:269; GAA polymorphisms and SNPs are described by Hirschhorn, R. and Reuser, A. J. (2001) in The Metabolic and Molecular Basis for Inherited Disease (Scriver, C. R., Beaudet. A. L., Sly, W. S. & Valle, D. Eds.), pp. 3389-3419, McGraw-Hill, New York, see pages 3403-3405; each incorporated herein by reference in its entirety). Any GAA coding sequence known in the art may be used, for example, see the coding sequences of FIGS. 8 and 9; GenBank Accession number NM_00152 and Hoefsloot et al., (1988) EMBO J. 7:1697 and Van Hove et al., (1996) Proc. Natl. Acad. Sci. USA 93:65 (human), GenBank Accession number NM_008064 (mouse), and Kunita et al., (1997) Biochemica et Biophysics Acta 1362:269 (quail); the disclosures of which are incorporated herein by reference for their teachings of GAA coding and noncoding sequences.

[0118] The terms “cation-independent mannose-6-phosphate receptor (CI-MPR),” “M6P/IGF-II receptor,” “CI-MPR/IGF-II receptor,” “IGF-II receptor” or “IGF2 Receptor,” or abbreviations thereof, are used interchangeably herein, referring to the cellular receptor which binds both M6P and IGF-II.

[0119] The term “targeting peptide” is also referred to as a “targeting sequence” as used herein is intended to refer to a peptide that targets a particular subcellular compartment, for example, a mammalian lysosome. A targeting peptide encompassed for use herein is a lysosome targeting peptide that is mannose-6-phosphate-independent. An exemplary targeting sequence is an IGF2 targeting peptide as disclosed herein.

[0120] The term “IGF2 sequence” is used in conjunction with “IGF2 targeting sequence” or “IGF2 leader sequence” and “IGF2 targeting peptide” are used interchangeably herein and refer to a sequence of the IGF2 polypeptide that binds to the CI-MBR on the surface of the cell. In particular, the IGF2 sequence is a peptide that comprises a part of the IGF2 uptake sequence of SEQ ID NO: 5, or comprises a modification in amino acid of SEQ ID NO:5. An IGF2 targeting peptide refers to a peptide sequence that binds to a receptor domain consisting essentially of repeats 11-12, repeat 11 or amino acids 1508-1566 of the human cation-independent mannose-6-phosphate receptor (CI-MPR or CA-M6P receptor).

[0121] The term “leader sequence” is used interchangeably herein with the term “secretory signal sequence” or “signal sequence” or “signal peptide” or variations thereof, and intended to refer to amino acid sequences that function to enhance (as defined above) secretion of an operably linked polypeptide, (e.g., a GAA peptide or IGF2-GAA fusion protein) from the cell as compared with the level of secretion seen with the native polypeptide. As defined above, by “enhanced” secretion, it is meant that the relative proportion of lysosomal polypeptide synthesized by the cell that is secreted from the cell is increased; it is not necessary that the absolute amount of secreted protein is also increased. In particular embodiments of the invention, essentially all (i.e., at least 95%, 97%, 98%, 99% or more) of the GAA-polypeptide is secreted. It is not necessary, however, that essentially all or even most of the GAA polypeptide is secreted, as long as the level of secretion is enhanced as compared with the native GAA polypeptide. Exemplary leader sequences include, but are not limited to the innate GAA leader sequence (also referred to cognate GAA leader sequence), AAT sequence, IL2(1-3), IL2 leader sequence (IL2 wt), a modified IL2 leader sequence (IL2 mut), fibronectin (FN1, also referred to as FBN), or IgG leader sequence or functional variants thereof, as disclosed herein.

[0122] As used herein, the term “amino acid” encompasses any naturally occurring amino acid, modified forms thereof, and synthetic amino acids. Naturally occurring, levorotatory (L-) amino acids are disclosed in Table 2 of US Publication 2018/0371496, which is incorporated herein in its entirety. Alternatively, the amino acid can be a modified amino acid residue (nonlimiting examples are shown in Table 4 of US Publication of US Publication 2018/0371496) and/or can be an amino acid that is modified by post-translation modification (e.g., acetylation, amidation, formylation, hydroxylation, methylation, phosphorylation or sulfatation). Further, the non-naturally occurring amino acid can be an “unnatural” amino acid as described by Wang et al., Annu Rev Biophys Biomol Struct. 35:225-49 (2006). These unnatural amino acids can advantageously be used to chemically link molecules of interest to the AAV capsid protein.

[0123] To illustrate further, if, for example, the specification indicates that a particular amino acid can be selected from A, G, I, L and/or V, this language also indicates that the amino acid can be selected from any subset of these amino acid(s) for example A, G, I or L; A, G, I or V; A or G; only L; etc. as if each such subcombination is expressly set forth herein. Moreover, such language also indicates that one or more of the specified amino acids can be disclaimed (e.g., by negative proviso). For example, in particular embodiments the amino acid is not A, G or I; is not A; is not G or V; etc. as if each such possible disclaimer is expressly set forth herein.

[0124] The term “cis-regulatory element” or “CRE”, is a term well-known to the skilled person, and means a nucleic acid sequence such as an enhancer, promoter, insulator, or silencer, that can regulate or modulate the transcription of a neighboring gene (i.e. in cis). CREs are found in the vicinity of the genes that they regulate. CREs typically regulate gene transcription by binding to transcription factors (TFs), i.e. they include TF binding site (TFBS). A single TF may bind to many CREs, and hence control the expression of many genes (pleiotropy). CREs are usually, but not always, located upstream of the transcription start site (TSS) of the gene that they regulate. “Enhancers” are CREs that enhance (i.e. upregulate) the transcription of genes that they are operably associated with, and can be found upstream, downstream, and even within the introns of the gene that they regulate. Multiple enhancers can act in a coordinated fashion to regulate transcription of one gene. “Silencers” in this context relates to CREs that bind TFs called repressors, which act to prevent or downregulate transcription of a gene. The term “silencer” can also refer to a region in the 3′ untranslated region of messenger RNA, that bind proteins which suppress translation of that mRNA molecule, but this usage is distinct from its use in describing a CRE. Generally, the CREs of the present invention are liver-specific enhancers (often referred to as liver-specific CREs, or liver-specific CRE enhancers, or suchlike). In the present context, it is preferred that the CRE is located 1500 nucleotides or less from the transcription start site (TSS), more preferably 1000 nucleotides or less from the TSS, more preferably 500 nucleotides or less from the TSS, and suitably 250, 200, 150, or 100 nucleotides or less from the TSS. CREs of the present invention are preferably comparatively short in length, preferably 100 nucleotides or less in length, for example they may be 90, 80, 70, 60 nucleotides or less in length.

[0125] The term “cis-regulatory module” or “CRM” means a functional module made up of two or more CREs; in the present invention the CREs are typically liver-specific enhancers. Thus, in the present application a CRM typically comprises a plurality of liver-specific enhancer CREs. Typically, the multiple CREs within the CRM act together (e.g. additively or synergistically) to enhance the transcription of a gene that the CRM is operably associated with. There is conservable scope to shuffle (i.e. reorder), invert (i.e. reverse orientation), and alter spacing in CREs within a CRM. Accordingly, functional variants of CRMs of the present invention include variants of the referenced CRMs wherein CREs within them have been shuffled and/or inverted, and/or the spacing between CREs has been altered.

[0126] As used herein, the phrase “promoter” refers to a region of DNA that generally is located upstream of a nucleic acid sequence to be transcribed that is needed for transcription to occur, i.e. which initiates transcription. Promoters permit the proper activation or repression of transcription of a coding sequence under their control. A promoter typically contains specific sequences that are recognized and bound by plurality of TFs. TFs bind to the promoter sequences and result in the recruitment of RNA polymerase, an enzyme that synthesizes RNA from the coding region of the gene. A great many promoters are known in the art.

[0127] The term “synthetic promoter” as used herein relates to a promoter that does not occur in nature. In the present context it typically comprises a synthetic CRE and/or CRM of the present invention operably linked to a minimal (or core) promoter or liver-specific proximal promoter. The CREs and/or CRMs of the present invention serve to enhance liver-specific transcription of a gene operably linked to the promoter. Parts of the synthetic promoter may be naturally occurring (e.g. the minimal promoter or one or more CREs in the promoter), but the synthetic promoter as a complete entity is not naturally occurring.

[0128] As used herein, “minimal promoter” (also known as the “core promoter”) refers to a short DNA segment which is inactive or largely inactive by itself, but can mediate transcription when combined with other transcription regulatory elements. Minimum promoter sequence can be derived from various different sources, including prokaryotic and eukaryotic genes. Examples of minimal promoters are discussed above, and include the dopamine beta-hydroxylase gene minimum promoter, cytomegalovirus (CMV) immediate early gene minimum promoter (CMV-MP), and the herpes thymidine kinase minimal promoter (MinTK). A minimal promoter typically comprises the transcription start site (TSS) and elements directly upstream, a binding site for RNA polymerase II, and general transcription factor binding sites (often a TATA box).

[0129] As used herein, “proximal promoter” relates to the minimal promoter plus the proximal sequence upstream of the gene that tends to contain primary regulatory elements. It often extends approximately 250 base pairs upstream of the TSS, and includes specific TFBS. In the present case, the proximal promoter is suitably a naturally occurring liver-specific proximal promoter that can be combined with one or more CREs or CRMs of the present invention. However, the proximal promoter can be synthetic.

[0130] A “functional variant” of a cis-regulatory element (CRE), cis-regulatory module (CRM), promoter or other nucleic acid sequence in the context of the present invention is a variant of a reference sequence that retains the ability to function in the same way as the reference sequence, e.g. as a liver-specific cis-regulatory enhancer element, liver-specific cis-regulatory module or liver-specific promoter. Alternative terms for such functional variants include “biological equivalents” or “equivalents”.

[0131] It will be appreciated that the ability of a given cis-regulatory element to function as a liver-specific enhancer is determined principally by the ability of the sequence to bind the same liver-specific transcription factors (TFs) that bind to the reference sequence. Accordingly, in most cases, a functional variant of a cis-regulatory element will contain TFBS for the same TFs as the reference cis-regulatory element. It is preferred, but not essential, that the transcription factor binding site (TFBS) of a functional variant are in the same relative positions (i.e. order) as the reference cis-regulatory element. It is also preferred, but not essential, that the TFBS of a functional variant are in the same orientation as the reference sequence (it will be noted that TFBS can in some cases be present in reverse orientation, e.g. as the reverse complement vis-à-vis the sequence in the reference sequence). It is also preferred, but not essential, that the TFBS of a functional variant are on the same strand as the reference sequence. Thus, in preferred embodiments, the functional variant comprises TFBS for the same TFs, in the same order, in the same orientation and on the same strand as the reference sequence. It will also be appreciated that the sequences lying between TFBS (referred to in some cases as spacer sequences, or suchlike) are of less consequence to the function of the cis-regulatory element. Such sequences can typically be varied considerably, and their lengths can be altered. However, in preferred embodiments the spacing (i.e. the distance between adjacent TFBS) is substantially the same (e.g. it does not vary by more than 20, preferably by not more than 10%, more preferably it is the same) in a functional variant as it is in the reference sequence. It will be apparent that in some cases a functional variant of a cis-regulatory enhancer element can be present in the reverse orientation, e.g. it can be the reverse complement of a cis-regulatory enhancer element as described above, or a variant thereof.

[0132] Levels of sequence identity between a functional variant and the reference sequence can also be an indicator or retained functionality. High levels of sequence identity in the TFBS of the cis-regulatory element is of generally higher importance than sequence identity in the spacer sequences (where there is little or no requirement for any conservation of sequence). However, it will be appreciated that even within the TFBS, a considerable degree of sequence variation can be accommodated, given that the sequence of a functional TFBS does not need to exactly match the consensus sequence.

[0133] The ability of one or more TFs to bind to a TFBS in a given functional variant can determined by any relevant means known in the art, including, but not limited to, electromobility shift assays (EMSA), binding assays, chromatin immunoprecipitation (ChIP), and ChIP-sequencing (ChIP-seq). In a preferred embodiment the ability of one or more TFs to bind a given functional variant is determined by EMSA. Methods of performing EMSA are well-known in the art. Suitable approaches are described in Sambrook et al. cited above. Many relevant articles describing this procedure are available, e.g. Hellman and Fried, Nat Protoc. 2007; 2(8): 1849-1861.

[0134] The terms “liver-specific” or “liver-specific expression” when in reference to a promoter refers to the ability of a cis-regulatory element, cis-regulatory module or promoter to enhance or drive expression of a gene in the liver (or in liver-derived cells) in a preferential or predominant manner as compared to other tissues (e.g. spleen, muscle, heart, lung, and brain). Expression of the gene can be in the form of mRNA or protein. In some embodiments, liver-specific expression is such that there is negligible expression in other (i.e. non-liver) tissues or cells, i.e. expression is highly liver-specific. In some embodiments, while a liver-specific promoter drives expression preferentially in the liver, it can also drive expression of the gene in another tissue of interest at a lower level, e.g., muscle.

[0135] The ability of a cis-regulatory element to function as a liver-specific cis-regulatory enhancer element can be readily assessed by the skilled person. The skilled person can thus easily determine whether any variant of the specific cis-regulatory elements recited above remains functional (i.e. it is a functional variant as defined above). For example, any given cis-regulatory element to be assessed can be operably linked to a minimal promoter (e.g. positioned upstream of CMV-MP) and the ability of the cis-regulatory element to drive liver-specific expression of a gene (typically a reporter gene) is measured. Alternatively, a variant of a cis-regulatory enhancer element can be substituted into a synthetic liver-specific promoter in place of a reference cis-regulatory enhancer element, and the effects on liver-specific expression driven by said modified promoter can be determined and compared to the unmodified form. Similarly, the ability of a cis-regulatory module or promoter to drive liver-specific expression can be readily assessed by the skilled person (e.g. as described in the examples below). Expression levels of a gene driven by a variant of a reference promoter can be compared to the expression levels driven by the reference sequence. In some embodiments, where liver-specific expression levels driven by a variant promoter are at least 50%, at least 60%, at least 70%, at least 80%, at least 90%, or at least 100% of the expression levels driven by the reference promoter, it can be said that the variant remains functional. Suitable nucleic acid constructs and reporter assays to assess liver-specific expression enhancement can easily be constructed, and the examples set out below give suitable methodologies.

[0136] Liver-specificity can be identified wherein the expression of a gene (e.g. a therapeutic or reporter gene) occurs preferentially or predominantly in liver-derived cells. Preferential or predominant expression can be defined, for example, where the level of expression is significantly greater in liver-derived cells than in other types of cells (i.e. non-liver-derived cells). For example, expression in liver-derived cells is suitably at least 5-fold higher than non-liver cells, preferably at least 10-fold higher than non-liver cells, and it may be 50-fold higher or more in some cases. For convenience, liver-specific expression can suitably be demonstrated via a comparison of expression levels in a hepatic cell line (e.g. liver-derived cell line such as Huh7 and/or HepG2 cells) or liver primary cells, compared with expression levels in a kidney-derived cell line (e.g. HEK-293), a cervical tissue-derived cell line (e.g. HeLa) and/or a lung-derived cell line (e.g. A549).

[0137] The synthetic liver-specific promoters of the present invention are preferably suitable for promoting expression in the liver of a subject, e.g. driving liver-specific expression of a transgene, preferably a therapeutic transgene. In some embodiments, the liver-specific promoters of the invention are suitable for promoting liver-specific transgene expression at a level at least 1.5-fold greater than the LP1 promoter of SEQ ID NO: 432, preferably 2-fold greater than the LP1 promoter, more preferably 3-fold greater than the LP1 promoter, and yet more preferably 5-fold greater than the LP1 promoter (SEQ ID NO: 432). Such expression is suitably determined in liver-derived cells, e.g. in Huh7, and/or HepG2 cells or primary liver cells (suitably primary human hepatocytes). In some embodiments, the synthetic liver-specific promoters of the present invention are suitable for promoting gene expression at a level of at least 1.5-fold less than an LP1 promoter (SEQ ID NO: 432) in non-liver-derived cells (e.g. HEK-293, HeLa, and/or A549 cells).

[0138] Preferred synthetic liver-specific promoters of the present invention are suitable for promoting liver-specific transgene expression and have an activity in liver cells which is at least 15%, 20%, 30%, 40%, 50%, 60%, 70%, 80%, 90%, 100%, 125%, 150%, 175%, 200%, 250%, 300%, 350% or 400% of the activity of the TBG promoter (SEQ ID NO: 435).

[0139] The synthetic liver-specific promoters of the present invention are preferably suitable for promoting liver-specific expression at a level at least 1.5-fold greater than a CMV-IE promoter of SEQ ID NO: 433 in liver-derived cells, preferably at least 2-fold greater than a CMV promoter in liver-derived cells (e.g. HEK-293, HeLa, and/or A549 cells). The synthetic liver specific promoters disclosed herein can be LSP-H, LSP-M and LSP-L promoters, referring to high, medium and low expression in the liver, and in some embodiments, the LSP-H, LSP-M and LSP-L can preferentially or predominantly express a protein in the liver, but can also express the protein on one or more other tissues, for example, in the muscle and/or brain. Such LSP-H, LSP-M and LSP-L promoters disclosed herein can preferentially express at least 90%, or at least 80%, or at least 70% or at least 60%, or at least 50% of a protein in the liver, and also express at least 10%, or at least 20%, or at least 30%, or at least 40% or at least 50% in another tissue, for example, in muscle tissue. In some embodiments, a LSP-H, LSP-M and LSP-L promoter useful in the method and compositions as disclosed herein, for example for the treatment of Pompe or a lysosomal disease drives or enhances gene expression in a preferential or predominant manner in the liver, but can also express at least some of the protein in muscle tissue.

[0140] The terms “identity” and “identical” and the like refer to the sequence similarity between two polymeric molecules, e.g., between two nucleic acid molecules, such as between two DNA molecules. Sequence alignments and determination of sequence identity can be done, e.g., using the Basic Local Alignment Search Tool (BLAST) originally described by Altschul et al. 1990 (J Mol Biol 215: 403-10), such as the “Blast 2 sequences” algorithm described by Tatusova and Madden 1999 (FEMS Microbiol Lett 174: 247-250).

[0141] The term “synthetic” as used herein means a nucleic acid molecule that does not occur in nature. Synthetic nucleic acid expression constructs of the present invention are produced artificially, typically by recombinant technologies. Such synthetic nucleic acids may contain naturally occurring sequences (e.g. promoter, enhancer, intron, and other such regulatory sequences), but these are present in a non-naturally occurring context. For example, a synthetic gene (or portion of a gene) typically contains one or more nucleic acid sequences that are not contiguous in nature (chimeric sequences), and/or may encompass substitutions, insertions, and deletions and combinations thereof.

[0142] A “spacer sequence” or “spacer” as used herein is a nucleic acid sequence that separates two functional nucleic acid sequences. It can have essentially any sequence, provided it does not prevent the functional nucleic acid sequence (e.g. cis-regulatory element) from functioning as desired (e.g. this could happen if it includes a silencer sequence, prevents binding of the desired transcription factor, or suchlike). Typically, it is non-functional, as in it is present only to space adjacent functional nucleic acid sequences from one another.

[0143] The term “pharmaceutically acceptable” as used herein is consistent with the art and means compatible with the other ingredients of the pharmaceutical composition and not deleterious to the recipient thereof.

[0144] By the terms “treat,” “treating” or “treatment of” (and grammatical variations thereof) it is meant that the severity of the subject's condition is reduced, at least partially improved or stabilized and/or that some alleviation, mitigation, decrease or stabilization in at least one clinical symptom is achieved and/or there is a delay in the progression of the disease or disorder.

[0145] The terms “prevent,” “preventing” and “prevention” (and grammatical variations thereof) refer to prevention and/or delay of the onset of a disease, disorder and/or a clinical symptom(s) in a subject and/or a reduction in the severity of the onset of the disease, disorder and/or clinical symptom(s) relative to what would occur in the absence of the methods of the invention. The prevention can be complete, e.g., the total absence of the disease, disorder and/or clinical symptom(s). The prevention can also be partial, such that the occurrence of the disease, disorder and/or clinical symptom(s) in the subject and/or the severity of onset is substantially less than what would occur in the absence of the present invention.

[0146] A “treatment effective” amount as used herein is an amount that is sufficient to provide some improvement or benefit to the subject. Alternatively stated, a “treatment effective” amount is an amount that will provide some alleviation, mitigation, decrease or stabilization in at least one clinical symptom in the subject. Those skilled in the art will appreciate that the therapeutic effects need not be complete or curative, as long as some benefit is provided to the subject.

[0147] A “prevention effective” amount as used herein is an amount that is sufficient to prevent and/or delay the onset of a disease, disorder and/or clinical symptoms in a subject and/or to reduce and/or delay the severity of the onset of a disease, disorder and/or clinical symptoms in a subject relative to what would occur in the absence of the methods of the invention. Those skilled in the art will appreciate that the level of prevention need not be complete, as long as some preventative benefit is provided to the subject.

[0148] The phrase a “therapeutically effective amount” and like phrases mean a dose or plasma concentration in a subject that provides the desired specific pharmacological effect, e.g. to express a therapeutic gene in the liver, and secretion into the plasma. It is emphasized that a therapeutically effective amount may not always be effective in treating the conditions described herein, even though such dosage is deemed to be a therapeutically effective amount by those of skill in the art. The therapeutically effective amount may vary based on the route of administration and dosage form, the age and weight of the subject, and/or the disease or condition being treated.

[0149] The terms “individual,” “subject,” and “patient” are used interchangeably, and refer to any individual subject with a disease or condition in need of treatment. For the purposes of the present disclosure, the subject may be a primate, preferably a human, or another mammal, such as a dog, cat, horse, pig, goat, or bovine, and the like.

[0150] Additional patents incorporated for reference herein that are related to, disclose or describe an AAV or an aspect of an AAV, including the DNA vector that includes the gene of interest to be expressed are: U.S. Pat. Nos. 6,491,907; 7,229,823; 7,790,154; 7,201898; 7,071,172; 7,892,809; 7,867,484; 8,889,641; 9,169,494; 9,169,492; 9,441,206; 9,409,953; and, 9,447,433; 9,592,247; and, 9,737,618.

### II. rAAV Genome Elements

[0151] As disclosed herein, one aspect of the technology relates to a rAAV vector comprising a capsid, and within its capsid, a nucleotide sequence referred to as the “rAAV vector genome”. The rAAV vector genome (also referred to as “rAAV genome) includes multiple elements, including, but not limited to two inverted terminal repeats (ITRs, e.g., the 5′-ITR and the 3′-ITR), and located between the ITRs are additional elements, including a promoter, a heterologous gene and a poly-A tail.

[0152] In some embodiments, the rAAV genome disclosed herein comprises a 5′ ITR and 3′ ITR sequence, and located between the 5′ITR and the 3′ ITR, a promoter, e.g., a liver specific promoter sequence as disclosed herein, which operatively linked to a heterologous nucleic acid encoding a nucleic acid encoding an alpha-glucosidase (GAA) polypeptide, where the heterologous nucleic acid sequence can optionally further comprise one or more of the following elements: an intron sequence, a nucleic acid encoding a secretory signal peptide, a nucleic acid encoding an IGF2 targeting peptide, and a poly A sequence.

[0153] In some embodiments, the rAAV genome disclosed herein comprises a 5′ ITR and 3′ ITR sequence, and located between the 5′ITR and the 3′ ITR, a promoter operatively linked to a heterologous nucleic acid encoding a secretory peptide and nucleic acid encoding an alpha-glucosidase (GAA) polypeptide (i.e., the heterologous nucleic acid encodes a GAA fusion polypeptide comprising a signal peptide-GAA polypeptide), where the rAAV genome optionally further comprises one or more of: an intron sequence, a collagen stability (CS) sequence, a polyA tail and a nucleic acid encoding a spacer of at least 1 amino acid. In some embodiments, the rAAV genome disclosed herein comprises a 5′ ITR and 3′ ITR sequence, and located between the 5′ITR and the 3′ ITR, a liver specific promoter as disclosed herein operatively linked to a heterologous nucleic acid encoding a secretory peptide (e.g., FN1, AAT or GAA signal peptides) and nucleic acid encoding an alpha-glucosidase (GAA) polypeptide, where the rAAV genome optionally further comprises one or more of: an intron sequence (e.g., MVM or HBB2 intron sequence), a collagen stability (CS) sequence, a polyA tail and a nucleic acid encoding a spacer of at least 1 amino acid.

[0154] In some embodiments, the rAAV genome disclosed herein comprises a 5′ ITR and 3′ ITR sequence, and located between the 5′ITR and the 3′ ITR, a promoter operatively linked to a heterologous nucleic acid encoding a secretory peptide, a targeting peptide and a GAA polypeptide (i.e., the heterologous nucleic acid encodes a GAA fusion polypeptide comprising a signal peptide-targeting sequence-GAA polypeptide), where targeting peptide is a IGF2 targeting peptide as described herein, and where the rAAV genome can optionally further comprise one or more of: an intron sequence, a collagen stability (CS) sequence, a polyA tail and a nucleic acid encoding a spacer of at least 1 amino acid.

[0155] Each of the elements in the rAAV genome are discussed herein.

### A. Alpha-Glucosidase (GAA) Polypeptide

[0156] Alpha-glucosidase (GAA) polypeptide is a member of family 31 of glycoside hydrolyases. Human GAA is synthesized as a 110 kDal precursor (Wisselaar et al. (1993) J. Biol. Chem. 268(3): 2223-31). The mature form of the enzyme is a mixture of monomers of 70 and 76 kDal (Wisselaar et al. (1993) J. Biol. Chem. 268(3): 2223-31). The precursor enzyme has seven potential glycosylation sites and four of these are retained in the mature enzyme (Wisselaar et al. (1993) J. Biol. Chem. 268(3): 2223-31). The proteolytic cleavage events which produce the mature enzyme occur in late endosomes or in the lysosome (Wisselaar et al. (1993) J. Biol. Chem. 268(3): 2223-31).

[0157] The rAAV vector genome can encode a GAA polypeptide can include, for example, amino acid residues 40-952 or 70-952 of human GAA, or a smaller portion, such as amino acid residues 40-790 or 70-790.

[0158] In one embodiment, the GAA polypeptide can be fused to an IGF2 targeting sequence. In some embodiments, a IGF2 targeting sequence is fused to amino acid 40, or amino acid 70, or to an amino acid within one or two positions of amino acid 40 or 70 of human GAA polypeptide. In some embodiments, the IGF2 targeting peptide as disclosed herein is a ligand for an extracellular receptor, for example, the IGF2 targeting peptide binds to human cation-independent mannose-6-phosphate receptor (CI-MPR) or the IGF2 receptor.

[0159] The C-terminal 160 amino acids are absent from the mature 70 and 76 kDal GAA polypeptide species. However, certain Pompe alleles resulting in the complete loss of GAA activity map to this region, for example Val949Asp (Becker et al. (1998) J. Hum. Genet. 62:991). The phenotype of this mutant indicates that the C-terminal portion of the protein, although not part of the 70 or 76 kDal species, plays an important role in the function of the protein. It has also been reported that the C-terminal portion of the protein, although cleaved from the rest of the protein during processing, remains associated with the major species (Moreland et al. (Nov. 1, 2004) J. Biol. Chem., Manuscript 404008200). Accordingly, the C-terminal residues could play a direct role in the catalytic activity of the protein, and/or may be involved in promoting proper folding of the N-terminal portions of the protein.

[0160] The native GAA gene encodes a precursor polypeptide which possesses a signal sequence and an adjacent putative trans-membrane domain, a trefoil domain (PFAM PF00088) which is a cysteine-rich domain of about 45 amino acids containing 3 disulfide linkages (Thim (1989) FEBS Lett. 250:85), the domain defined by the mature 70/76 kDal polypeptide, and the C-terminal domain. It has been reported that both the trefoil domain and the C-terminal domain are required for the production of functional GAA, and that it is possible that the C-terminal domain interacts with the trefoil domain during protein folding perhaps facilitating appropriate disulfide bond formation in the trefoil domain.

[0161] The GAA polypeptide is described in U.S. Pat. Nos. 5,962,313 and 6,537,785, which are incorporated herein in their entireties by reference. One of ordinary skill in the art can appreciate particular positions of GAA to which a secretory signal peptide (SS) or alternatively, the targeting peptide (e.g., IGF2 targeting peptide) can be fused. Accordingly, in one aspect the invention relates to a GAA fusion protein, where the SP or IGF2 targeting peptide is fused to amino acid 40, 68, 69, 70, 71, 72, 779, 787, 789, 790, 791, 792, 793, or 796 of human GAA of SEQ ID NO: 10, or a modified GAA protein of SEQ ID NO: 170-174, or a portion thereof.

[0162] In some embodiments of the methods and compositions as disclosed herein, the human GAA protein expressed by the AAV comprises amino acids of SEQ ID NO: 10, or fragments or variants thereof, for example a human GAA protein beginning at residue 40, 68, 69, 70, 71, 72, 779, 787, 789, 790, 791, 792, 793, or 796 of SEQ ID NO: 10. In some embodiments of the methods and compositions as disclosed herein, the human GAA protein expressed by the AAV comprises amino acids of SEQ ID NO: 10, or a protein at least 60%, or 70%, or 80%, 85% or 90% or 95%, or 98%, or 99% identical to SEQ ID NO: 10. In some embodiments of the methods and compositions as disclosed herein, the human GAA protein expressed by the AAV comprises amino acids is a human GAA protein beginning at residue 40, 68, 69, 70, 71, 72, 779, 787, 789, 790, 791, 792, 793, or 796 of SEQ ID NO: 10, or a protein at least 60%, or 70%, or 80%, 85% or 90% or 95%, or 98%, or 99% identical thereto. In some embodiments, the human GAA protein expressed by the AAV comprises amino acids of beginning at residue 40, 68, 69, 70, 71, 72, 779, 787, 789, 790, 791, 792, 793, or 796 of any of SEQ ID NO: 170 (modGAA; H199R, R223H) or SEQ ID NO: 171 (modGAA; H199R, R223H, H201L) or a protein at least 60%, or 70%, or 80%, 85% or 90% or 95%, or 98%, or 99% identical thereto.

[0163] In some embodiments, one of ordinary skill in the art can appreciate particular positions of GAA to which a secretory signal peptide (SS) or alternatively, the targeting peptide (e.g., IGF2 targeting peptide) can be fused. For example, International Patent application WO2018046774A1, which is incorporated herein in its entirety, discloses truncated GAA polypeptides to which the secretory signal peptide (SS) or alternatively, the targeting peptide (e.g., IGF2 targeting peptide) can be attached. The signal peptide or IGF2 targeting peptide can be attached to any truncated GAA polypeptide or truncated modified GAA polypeptide, starting amino acids of GAA truncated proteins as disclosed in U.S. Provisional Application 62,937,556, filed on Nov. 19, 2019 and International Application WO 2020/102667, filed Nov. 15, 2019. which is incorporated herein in its entirety by reference.

[0164] In some embodiments, the GAA-fusion polypeptides encoded by the rAAV genome as described herein can include, for example, amino acid residues 40-952 or residues 70-952 of human GAA, or a smaller portion, such as amino acid residues 40-790 or 70-790. In one embodiment, a secretory signal peptide (SS) or targeting peptide, e.g., IGF2 targeting peptide is fused to amino acid 40, or to amino acid 70, or to an amino acid within one or two positions of amino acid 40 or 70.

[0165] In some embodiments, the fusion protein comprising the secretory signal peptide (SS) and GAA polypeptide and optionally an IGF2 targeting peptide (i.e., a SS-GAA fusion polypeptide, or a SS-IGF2-GAA fusion protein) comprises amino acid residues 40-952 or residues 70-952 of human acid alpha-glucosidase (GAA) (SEQ ID NO: 10). In some embodiments, the N-terminal of the GAA polypeptide is attached to the C-terminus of the SS and in some embodiments, the N-terminal of the GAA polypeptide is attached to the C-terminus of the IGF2 targeting peptide, and the N-terminus of the IGF2 targeting peptide is attached to the C-terminus of the secretory signal peptide.

[0166] (i) Modified GAA (modGAA)

[0167] In some embodiments, the GAA protein comprises a H201L variant, as disclosed in US2014/0186326, and Moreland et al., Gene, 2012; 491 (25-30), which are both incorporated herein in their entirety by reference. In particular, the histidine (His) at amino acid position 201 is changed to a leucine (L) residue to enables rapid processing of the 76 kD GAA pre-protein into the mature 70 kD GAA protein.

[0168] In particular, in some embodiments, a fusion protein as disclosed herein comprises a GAA polypeptide of SEQ ID NO: 10, with a modification of amino acids that results in increased hydrophobicity at or near the N-terminal 70-kDa processing site. In some instances, the GAA peptide is modified at one or more amino acids corresponding to positions 190-209 of SEQ ID NO: 10. In further embodiments, the polypeptide is modified at one or more amino acids corresponding to positions 195-209 of SEQ ID NO: 10. In further embodiments, the modification is at one or more amino acids corresponding to amino acid positions 200-204 of SEQ ID NO: 10. In certain embodiments, the modification is at the amino acid corresponding to position 201 of SEQ ID NO: 10. In further embodiments, the modification is substitution of one or more amino acids with a more hydrophobic amino acid. In other embodiments, the modification is insertion of one or more hydrophobic amino acids. In even further embodiments, the hydrophobic amino acid is chosen from leucine and tyrosine, or a conservative amino acid of leucine or tyrosine.

[0169] In certain embodiments, GAA is modified to increase its hydrophobicity at or near the N-terminal 70-kDa processing site by substituting at least one amino acid with a more hydrophobic amino acid. In some embodiments, the substitution may be made within 5 amino acids upstream or downstream of the N-terminal 70-kDa processing site. In certain examples, the amino acid substitution may be made at an amino acid corresponding to position 195 to 209 of SEQ ID NO: 10. In other instances, the amino acid substitution may be made at an amino acid corresponding to position 200 to 204 of SEQ ID NO: 10. In further embodiments, the modified human GAA contains a hydrophobic amino acid at the position corresponding to amino acid position 201 of SEQ ID NO: 10. In some embodiments, GAA is modified by inserting one or more hydrophobic amino acids at or near the N-terminal 70-kDa processing site. Additional modifications include deletion of one or more amino acids at or near the N-terminal 70-kDa processing site.

[0170] In certain embodiments, a modified human GAA is provided containing a hydrophobic amino acid (natural or synthetic) at more than one position at the N-terminal 70-kDa processing site, or within 5 amino acids of the N-terminal 70-kDa processing site. In one embodiment, one of the modified amino acids is at the position corresponding to amino acid 201 of SEQ ID NO: 10.

[0171] In various embodiments the hydrophobic amino acid is chosen from valine, leucine, isoleucine, methionine, phenylalanine, tryptophan, tyrosine, cysteine or alanine. In further embodiments, the hydrophobic amino acid is leucine or tyrosine. In some embodiments, the modified human GAA contains a synthetic or non-natural amino acid that exhibits hydrophobic properties. Generally, the substituted amino acid is more hydrophobic than the wild-type amino acid, and thus increases the hydrophobicity at or near the N-terminal 70 kDa processing site.

[0172] In one exemplary embodiment, the modified GAA has a leucine at the position corresponding to amino acid 201 of SEQ ID NO: 10. In another embodiment, the modified GAA has a tyrosine at the position corresponding to amino acid 201 of SEQ ID NO: 10.

[0173] In some embodiments, the modified human GAA protein comprises a polypeptide with a His (H) to Arginine (R) (H199R) modification at amino acid position 199 of SEQ ID NO: 10 (GAA(H199R), or a modification of an arginine (R) to a histidine (H) (R223H) at amino acid position 223 of SEQ ID NO: 10 (GAA(R223H). In some embodiments, the modified human GAA protein comprises a polypeptide with a His (H) to Arginine (R) (H199R) modification at amino acid position 199 of SEQ ID NO: 10, and a modification of an arginine (R) to a histidine (H) (R223H) at amino acid position 223 of SEQ ID NO: 10 (GAA(H199R-R223H). In some embodiments, the modified human GAA protein comprises SEQ ID NO: 170 or a variant of at least 80%, 90%, 95%, or 99% homology to at least 500, 550, 600, 650, 700, 750, 800, 850, or 900 amino acids of SEQ ID NO: 170, having at least one modification of H199R or R223H, or both. In some embodiments, the cognate leader sequence of GAA (i.e., SEQ ID NO: 175 or amino acids 1-27 of SEQ ID NO: 170) is replaced with an IGF2 targeting peptide as disclosed herein, or a leader sequence of SEQ ID NO: 176, or an IL2 wild type leader peptide (SEQ ID NO: 178), modified IL2 leader peptide (SEQ ID NO: 180) or leader peptides at least 90% sequence identity to SEQ ID Nos 176, 178 or 180.

[0174] In some embodiments, the modified human GAA protein comprises SEQ ID NO: 171 or a variant of at least 80%, 90%, 95%, or 99% homology to at least 500, 550, 600, 650, 700, 750, 800, 850, or 900 amino acids of SEQ ID NO: 171, comprising at least the modification of H210L. In some embodiments, the cognate leader sequence of GAA (i.e., SEQ ID NO: 175 or amino acids 1-27 of SEQ ID NO: 171) is replaced with an IGF2 targeting peptide as disclosed herein, or a leader sequence of SEQ ID NO: 176, or an IL2 wild type leader peptide (SEQ ID NO: 178), modified IL2 leader peptide (SEQ ID NO: 180) or leader peptides at least 90% sequence identity to SEQ ID Nos 176, 178 or 180

[0175] In some embodiments, the modified human GAA protein comprises a polypeptide with at least one modification selected from: H199R, R223H, or H201L of SEQ ID NO: 10, or a variant of at least 80%, 90%, 95%, or 99% homology to at least 500, 550, 600, 650, 700, 750, 800, 850, or 900 amino acids of SEQ ID NO: 10 having at least one of these modification. In some embodiments, the modified human GAA protein comprises a polypeptide comprises at least two modifications selected from: H199R, R223H, or H201L of SEQ ID NO: 10, or a variant of at least 80%, 90%, 95%, or 99% homology to at least 500, 550, 600, 650, 700, 750, 800, 850, or 900 amino acids of SEQ ID NO: 10 having at least two of these modification. In some embodiments, the modified human GAA protein comprises a polypeptide with three modifications H199R, R223H, and H201L of SEQ ID NO: 10 (GAA-H199R-H201L-R223H), or a variant of at least 80%, 90%, 95%, or 99% homology to at least 500, 550, 600, 650, 700, 750, 800, 850, or 900 amino acids of SEQ ID NO: 10 having these three modifications.

[0176] In certain embodiments, modified human GAAs are provided having at least 80%, 90%, 95%, or 99% homology to at least 500, 550, 600, 650, 700, 750, 800, 850, or 900 amino acids of SEQ ID NO: 10, and wherein the modified human GAA has at least one amino acid in the N-terminal 70-kDa processing site substituted with a more hydrophobic amino acid.

[0177] In some embodiments, at least 50% of the modified human GAA is processed to a 70-kDa form in the lysosome within 20, 30, or 40 hours. In still further embodiments, substantially all of the modified human GAA is processed to a 70-kDa form in the lysosome within 55, 65, or 75 hours.

[0178] In certain embodiments, a modified human GAA of the invention can be identified by its more rapid proteolytic processing to a mature 70-kDa form, or a corresponding variant thereof. In other embodiments, a modified human GAA as described herein can be identified by the production of an 82-kDa intermediate polypeptide that is not produced during proteolytic processing of native human GAA. In further embodiments, a modified human GAA can be identified by the absence of a 76-kDa intermediate polypeptide that is produced during proteolytic processing of unmodified human GAA.

[0179] In certain embodiments, the polypeptide has at least 80% identity to at least 500 amino acids of SEQ ID NO: 10 or SEQ ID NO: 170-171. In some instances, the polypeptide has at least 90% identity to at least 500 amino acids of SEQ ID NO: 10 or SEQ ID NO: 170-171. In other instances, the polypeptide has at least 95% identity to at least 500 amino acids of SEQ ID NO: 10 or SEQ ID NO: 170-171.

[0180] In certain embodiments, the GAA polypeptide with a modification at amino acid 201 to a hydrophobic residue, e.g., for example a H201L modification, exhibits more rapid lysosomal protease processing when compared to an unmodified human acid alpha-glucosidase protein. In some embodiments, at least 50% of the GAA pre-polypeptide is proteolytically processed to a 70-kDa mature GAA form within 20 hours of expression. In other embodiments, substantially all the GAA pre-polypeptide is proteolytically processed to a 70-kDa mature GAA form within 55 hours of expression.

[0181] In some embodiments, the cognate GAA leader peptide of amino acids 1-27 of SEQ ID NO: 10 (i.e., MGVRHPPCSHRLLAVCALVSLATAALL, SEQ ID NO: 175) is replaced with a different signal peptide (leader peptide). For example, the cognate leader peptide of GAA (SEQ ID NO: 175) can be replaced with any of: (i) an IgG1 leader peptide (referred to herein as a “201 leader peptide” or “2011p” having an amino acid sequence of: MEFGLSWVFLVALLKGVQCE (SEQ ID NO: 176) encoded by nucleic acid sequence SEQ ID NO: 177, (ii) wtIL21p: MYRMQLLSCIALSLALVTNS (SEQ ID NO: 178) encoded by nucleic acid sequence SEQ ID NO: 179, or (iii) mutIL21p: MYRMQLLLLIALSLALVTNS (SEQ ID NO: 180) encoded by nucleic acid sequence SEQ ID NO: 181. In some embodiments, the cognate GAA leader peptide (SEQ ID NO: 175) remains present, and an additional signal peptide is added, e.g., any one or more of signal peptides AAT, FN1, an IgG1 leader peptide (referred to herein as a “201 leader peptide” or “2011p” having an amino acid sequence of: MEFGLSWVFLVALLKGVQCE (SEQ ID NO: 176) encoded by nucleic acid sequence SEQ ID NO: 177, (ii) wtIL21p: MYRMQLLSCIALSLALVTNS (SEQ ID NO: 178) encoded by nucleic acid sequence SEQ ID NO: 179, or (iii) mutIL21p: MYRMQLLLLIALSLALVTNS (SEQ ID NO: 180) encoded by nucleic acid sequence SEQ ID NO: 181

[0182] In some embodiments, GAA is modified to add or remove glycosylation sites such as N-linked glycosylation sites, O-linked glycosylation sites or both. In certain embodiments, the addition or removal of glycosylation sites are achieved by N-terminal deletions, C-terminal deletions, internal deletions, random point mutagenesis, or, site directed mutagenesis. In some embodiments, the exemplary GAA modification involve addition of one or more Asparagine (Asn) residue/s or, one or more mutation to yield Asparagine (Asn) residue/s or, deletion of one or more Asparagine (Asn) residue/s. In certain embodiments, all or some of the N-linked, and/or, O-linked glycosylation sites present in GAA are mutated. In some embodiments, GAA modifications will yield information pertaining to the biological activity, physical structure and/or substrate binding potential of GAA.

[0183] (ii) Nucleic Acid Encoding GAA

[0184] In some embodiments, the rAAV genome comprises a heterologous nucleic acid sequence encoding the entire GAA polypeptide (e.g., the N-terminal/catalytic and the C-terminal domain), that is not fused to a heterologous signal sequence or a targeting peptide.

[0185] In some embodiments, the rAAV genome comprises a heterologous nucleic acid sequence encoding a secretory signal peptide or IGF2 targeting peptide fused in frame to the 3′ terminus of a GAA nucleic acid sequence that encodes the entire GAA polypeptide (e.g., the N-terminal/catalytic and the C-terminal domain). For example, heterologous nucleic acid sequence encoding a secretory signal peptide, or IGF2 targeting peptide is fused in frame to the 3′ terminus of a GAA nucleic acid sequence that encodes the 70 kDa and 76 kDa GAA polypeptides, such both polypeptides are expressed from the rAAV genome when the rAAV vector transduces a mammalian cell. In some embodiments, expression of the GAA nucleic acid can be driven by two promoters in the rAAV genome or by one promoter driving expression of a bicistronic construct.

[0186] In some embodiments of the methods and compositions as disclosed herein, the rAAV vector comprises a nucleic acid sequence encoding a GAA protein is a wild type GAA nucleic acid sequence, e.g., SEQ ID NO: 11 or SEQ ID NO: 72 or SEQ ID NO: 182. In some embodiments of the methods and compositions as disclosed herein, the rAAV vector comprises a nucleic acid sequence encoding a GAA protein which is a codon optimized GAA nucleic acid sequence, for any one or more of (i) enhanced expression in vivo, (ii) to reduce CpG islands, (iii).to reduce the innate immune response. Exemplary codon optimized GAA nucleic sequences encompassed for use in the methods and rAAV compositions as disclosed herein can be selected from any of: SEQ ID NO: 73, SEQ ID NO: 74, SEQ ID NO: 75, SEQ ID NO: 76 or SEQ ID NO: 182, or a nucleic acid sequence having at least 60%, or 70%, or 80%, 85% or 90% or 95%, or 98%, or 99% sequence identity to SEQ ID NO: 73, SEQ ID NO: 74, SEQ ID NO: 75, SEQ ID NO: 76 or SEQ ID NO: 182.

[0187] In addition, in some embodiments, the GAA nucleic acid sequences encompassed for use in the methods and rAAV compositions as disclosed herein are further modified with at least one or more of the following modifications: (i) removal of at least one, or two or in some embodiments, all alternative reading frames, (ii) removal of one or more CpGs islands, (iii) modification of the Kozak sequence, (iv) modification of a translational terminator sequence, and (v) removal of a spacer between promoter and Kozak sequence.

[0188] For example, in some embodiments, the rAAV composition comprises a hGAA nucleotide sequence of SEQ ID NO: 182, or a nucleic acid sequence having at least 60%, or 70%, or 80%, 85% or 90% or 95%, or 98%, or 99% sequence identity to SEQ ID NO: 182, where SEQ ID NO: 182 comprises the following elements shown in Table 1A, as compared to the wild type nucleic acid sequence for GAA;

TABLE 1A
elements of modGAA nucleic acid sequence.

| | Base pair (nucleotide numbers |
|---|---|
| modification | based on SEQ ID NO: 440) |
| cognate leader peptide | 954-1034 |
| | (81 bp) |
| GAT to GAC for Asp (T154C) | 1152-1154 |
| AST to AAC for Asn (T1901C) | 1899-1901 |
| GAT to GAC for Asp (T1910C) | 1909-1910 |
| GAT to GAC for Asp (T1967C) | 1965-1967 |
| GTT to GTG to remove CpG | 2022-2024 |
| (T2024G) | |
| CAA to CAG for gln (A2156G) | 2154-2156 |
| CAC to GAT to remove CpG | 2163-2165 |
| (C2165T) | |
| GTA to GTG for Val (A2393G) | 2391-2393 |
| AAT to AAC for Asn (T2561C) | 2259-2561 |
| GTC to GTG to remove CpG | 3399-3401 |
| (C3401G) | |
| GAT to GAC for Asp (T3536C) | 3534-3536 |
| Replacement of non optimal | 3810-3821 |
| stop | (12 bp) |

[0189] In some in some embodiments, the rAAV composition comprises a hGAA nucleotide sequence of SEQ ID NO: 182, or a nucleic acid sequence having at least 60%, or 70%, or 80%, 85% or 90% or 95%, or 98%, or 99% sequence identity to SEQ ID NO: 182, where the hGAA nucleotide sequence has been modified to with a series of point mutations that eliminate 3 potentially pro-inflammatory CpG motifs and a number of alternative reading frames (ARFs), where SEQ ID NO: 182 comprises the following point mutations as shown in Table 1B, as compared to the wildtype nucleic acid sequence for GAA, where numbering in table 1B assumes “A” in the GAA start codon ATG is the first nucleotide.

TABLE 1B

| NT# | Purpose | Original NT | New NT |
|---|---|---|---|
| 201 | Remove ORF | T | C |
| 949 | Remove ORF | T | C |
| 957 | Remove ORF | T | C |
| 1014 | Remove ORF | T | C |
| 1071 | Destroy CpG | T | G |
| 1203 | Remove ORF | A | G |
| 1212 | Destroy CpG | C | T |
| 1440 | Remove ORF | A | G |
| 1608 | Remove ORF | T | C |
| 2448 | Destroy CpG | C | G |
| 2583 | Remove ORF | T | C |

[0190] In some embodiments, the nucleic acid sequence encoding the cognate leader peptide in SEQ ID NO: 182 (e.g., nucleotides 1-81 of SEQ ID NO: 182) can be replaced by nucleic acid sequences encoding any of 2011p, wtIL21p or mutIL21p. Accordingly, in some embodiments, the nucleic residues 1-81 of SEQ ID NO: 182 (encoding the cognate leader peptide of GAA) can be replaced by nucleic acid sequences of SEQ ID NO: 177 (2011p), SEQ ID NO: 179 (wtIL21p) or SEQ ID NO: 181 (mutIL21p), or a nucleic acid sequence having at least 60%, or 70%, or 80%, 85% or 90% or 95%, or 98%, or 99% sequence identity to SEQ ID NOS: 177, 179 or 181.

[0191] In some embodiments, the rAAV vector or rAAV genome comprises a heterologous nucleic acid sequence encoding a GAA polypeptide comprising SEQ ID NO: 170 (GAA polypeptide with a cognate GAA signal sequence and H199R, R223H modifications), or SEQ ID NO: 171 (GAA polypeptide with a cognate GAA signal sequence and H199R, H201L, R223H modifications). The GAA polypeptide of SEQ ID NO: 170 is encoded by the nucleic acid sequence of SEQ ID NO: 182. Accordingly, in some embodiments, the rAAV vector comprises a nucleic acid of SEQ ID NO: 182 encoding a modified GAA polypeptide comprising H199R, R223H modifications. The GAA polypeptide of SEQ ID NO: 171 is encoded by the nucleic acid sequence of SEQ ID NO: 182 where basepairs (bp) 667-669 of SEQ ID NO: 182 are changed from CAC to any of: UUA, UUG, CUU, CUC CUA, CUG (resulting in a Histadine (H) to Leucine (L) amino acid change); or where bp 668 of SEQ ID NO: 182 is changed from A to U. Accordingly, in some embodiments, the rAAV vector comprises a nucleic acid of SEQ ID NO: 182, where bp 667-669 of SEQ ID NO: 182 are changed from CAC to any of: UUA, UUG, CUU, CUC CUA, CUG (which changes the amino acid from Histidine (H) to leucine (L)); or where bp 668 of SEQ ID NO: 182 is changed from A to U, which encodes a modified GAA polypeptide comprising H199R, H201L and R223H modifications.

[0192] In some embodiments, the rAAV vector or rAAV genome comprises a heterologous nucleic acid sequence encoding a GAA polypeptide selected from any of: SEQ ID NO: 172 (GAA polypeptide where cognate signal peptide is replaced with a IgG signal sequence and H199R, R223H modifications), or SEQ ID NO: 173 (GAA polypeptide where cognate signal peptide is replaced with a wtIL2 signal sequence and H199R, R223H modifications), SEQ ID NO: 174 (GAA polypeptide where cognate signal peptide is replaced with a mutIL3 signal sequence and H199R, R223H modifications).

[0193] In some embodiments, the rAAV vector or rAAV genome comprises a heterologous nucleic acid sequence comprising SEQ ID NO: 182 where bp 1-81 of SEQ ID NO: 182 is replaced with the nucleic acid of SEQ ID NO: 177 (IgG signal sequence), which encodes a GAA polypeptide of SEQ ID NO: 172 (IgG leader-GAA with H199R, R223H modifications). In some embodiments, the rAAV vector comprises a heterologous nucleic acid sequence comprising SEQ ID NO: 182, where bp 668 of SEQ ID NO: 182 is changed from A to U and where bp 1-81 of SEQ ID NO: 182 is replaced with the nucleic acid of SEQ ID NO: 177 (IgG signal peptide), which encodes a GAA polypeptide of SEQ ID NO: 172 (IgG leader-GAA with H199R, H201L and R223H modifications).

[0194] In some embodiments, the rAAV vector or rAAV genome comprises a heterologous nucleic acid sequence comprising SEQ ID NO: 182 where bp 1-81 of SEQ ID NO: 182 is replaced with the nucleic acid of SEQ ID NO: 179 (wt IL2 signal peptide), which encodes a GAA polypeptide of SEQ ID NO: 173 (wt IL2 signal peptide-GAA with H199R, R223H modifications). In some embodiments, the rAAV vector comprises a heterologous nucleic acid sequence comprising SEQ ID NO: 182, where bp 668 of SEQ ID NO: 182 is changed from A to U and where bp 1-81 of SEQ ID NO: 182 is replaced with the nucleic acid of SEQ ID NO: 179 (wt IL2 signal peptide), which encodes a GAA polypeptide of SEQ ID NO: 173 (wt IL2 signal peptide-GAA with H199R, H201L and R223H modifications).

[0195] In some embodiments, the rAAV vector comprises a heterologous nucleic acid sequence comprising SEQ ID NO: 182 where bp 1-81 of SEQ ID NO: 182 is replaced with the nucleic acid of SEQ ID NO: 181 (mutIL2 signal peptide), which encodes a GAA polypeptide of SEQ ID NO: 174 (mutIL2 signal peptide-GAA with H199R, R223H modifications). In some embodiments, the rAAV vector comprises a heterologous nucleic acid sequence comprising SEQ ID NO: 182, where bp 668 of SEQ ID NO: 182 is changed from A to U and where bp 1-81 of SEQ ID NO: 182 is replaced with the nucleic acid of SEQ ID NO: 181 (mut IL2 signal peptide), which encodes a GAA polypeptide of SEQ ID NO: 174 (mut IL2 signal peptide-GAA with H199R, H201L, and R223H modifications).

[0196] The C-terminal domain of GAA functions in trans in conjunction with the 70/76 kDal species to generate active GAA. The boundary between the catalytic domain and the C-terminal domain appears to be at about amino acid residue 791, based on its presence in a short region of less than 18 amino acids that is absent from most members of the family 31 hydrolyases and which contains 4 consecutive proline residues in GAA. It has been reported that the C-terminal domain associated with the mature species begins at amino acid residue 792 (Moreland et al. (Nov. 1, 2004) J. Biol. Chem., Manuscript 404008200). Accordingly, in some embodiments, the GAA nucleic acid sequence that encodes the entire GAA polypeptide, with the exception of the C-terminal domain. Thus, in such an embodiment, the rAAV vector can be used to transduce a mammalian cell that expresses the C-terminal domain of GAA as a separate polypeptide.

### B. Secretory Signal Peptide

[0197] Native GAA signal peptide is not cleaved in the ER thereby causing native GAA polypeptide to be membrane bound in the ER (Tsuji et al. (1987) Biochem. Int. 15(5):945-952). Disruption of the membrane association of GAA can be accomplished by replacing the endogenous GAA signal peptide (and optionally adjacent sequences) with an alternate signal peptide for GAA.

[0198] Accordingly, in representative embodiments, the rAAV vector and rAAV genome as disclosed herein further comprises a heterologous nucleic acid encoding a GAA polypeptide to be transferred to a target cell, attached to a heterologous nucleic acid sequence that encodes a secretory signal peptide in the place of the endogenous GAA signal peptide. The heterologous nucleic acid is operatively associated with the segment encoding the secretory signal peptide, such that upon transcription and translation a fusion polypeptide is produced containing the secretory signal sequence operably associated with (e.g., directing the secretion of) the GAA polypeptide.

[0199] In some embodiments, the AAV vector encodes a GAA polypeptide that comprises the endogenous GAA signal peptide (e.g., amino acids 1-27 of SEQ ID NO: 10 (also referred to as “innate GAA” or “cognate GAA” signal peptide). In some embodiments, the AAV vector encodes a GAA polypeptide that comprises the endogenous GAA signal peptide (e.g., amino acids 1-27 of SEQ ID NO: 10 (also referred to as “innate GAA” or “cognate GAA” signal peptide) and an additional heterologous (non native) signal sequence. In some embodiments, the GAA polypeptide that lacks the endogenous signal peptide of amino acids 1-27 of GAA is fused to a secretory signal. In some embodiments of the compositions and methods described herein, the secretory signal serves a general purpose of assisting the secretion of the GAA polypeptide, or a fusion polypeptide, e.g., the IGF2 targeting peptide-GAA fusion polypeptide from the liver cells into the blood, where it can travel and be targeted to the lysosomes of mammalian cells, for example, human cardiac and skeletal muscle cells, as described herein. In some embodiments, a heterologous secretory signal is selected from any of: a AAT signal peptide, a fibronectin signal peptide (FN1), a GAA signal peptide, or an active fragment of AAT, FN1 or GAA signal peptide having secretory signal activity.

[0200] In some embodiments, the secretory signal peptide is heterologous to (i.e., foreign or exogenous to) the polypeptide of interest. For example, a heterologous secretory signal peptide is a fibronectin secretory signal peptide, the polypeptide of interest is not fibronectin. In some embodiments, the secretory signal peptide is selected from any of: AAT signal peptide, a fibronectin signal peptide (FN1), or an active fragment of AAT, FN1 or GAA signal peptide having secretory signal activity. In alternative embodiments, the secretory signal peptide is not heterologous to GAA, i.e., the signal peptide is the GAA signal peptide (i.e., residues 1-27 of the native GAA polypeptide).

[0201] In some embodiments, the cognate GAA signal peptide of amino acids 1-27 of SEQ ID NO: 10 (i.e., MGVRHPPCSHRLLAVCALVSLATAALL, SEQ ID NO: 175) is replaced with a different or heterologous leader peptide. For example, the cognate leader peptide of GAA (SEQ ID NO: 175) can be replaced with any of the heterologous signal peptides selected from: (i) an IgG1 leader peptide (referred to herein as a “201 leader peptide” or “2011p” having an amino acid sequence of: MEFGLSWVFLVALLKGVQCE (SEQ ID NO: 176) encoded by nucleic acid sequence SEQ ID NO: 177, (ii) wtIL21p: MYRMQLLSCIALSLALVTNS (SEQ ID NO: 178) encoded by nucleic acid sequence SEQ ID NO: 179, or (iii) mutIL21p: MYRMQLLLLIALSLALVTNS (SEQ ID NO: 180) encoded by nucleic acid sequence SEQ ID NO: 181, or a leader peptide having at least 90% sequence identity to any of SEQ ID NOs 176, 178 or 180.

[0202] In general, the secretory signal peptide will be at the amino-terminus (N-terminus) of the fusion polypeptide (i.e., the nucleic acid segment encoding the secretory signal peptide is 5′ to the heterologous nucleic acid encoding the GAA peptide or GAA-fusion peptide in the rAAV vector or rAAV genome as disclosed herein). Alternatively, the secretory signal may be at the carboxyl-terminus or embedded within the GAA polypeptide or GAA fusion polypeptide (e.g., IGF2-GAA fusion polypeptide), as long as the secretory signal is operatively associated therewith and directs secretion of the GAA polypeptide or GAA fusion polypeptide of interest (either with or without cleavage of the signal peptide from the GAA polypeptide) from the cell.

[0203] The secretory signal is operatively associated with the GAA polypeptide or GAA fusion polypeptide is targeted to the secretory pathway. Alternatively stated, the secretory signal is operatively associated with the GAA polypeptide such that the GAA-polypeptide or GAA fusion polypeptide is secreted from the cell at a higher level (i.e., a greater quantity) than in the absence of the secretory signal peptide. In general, typically at least about 20%, 30%, 40%, 50%, 70%, 80%, 85%, 90%, 95% or more of the GAA-polypeptide or IGF2-GAA fusion polypeptide (alone and/or fused with the signal peptide) is secreted from the cell when a signal peptide is attached as compared to in the absence of the attachment of a secretory signal peptide. In other embodiments, essentially all of the detectable polypeptide (alone and/or in the form of the fusion polypeptide) is secreted from the cell.

[0204] By the phrase “secreted from the cell”, the polypeptide may be secreted into any compartment (e.g., fluid or space) outside of the cell including but not limited to: the interstitial space, blood, lymph, cerebrospinal fluid, kidney tubules, airway passages (e.g., alveoli, bronchioles, bronchia, nasal passages, etc.), the gastrointestinal tract (e.g., esophagus, stomach, small intestine, colon, etc.), vitreous fluid in the eye, and the cochlear endolymph, and the like.

[0205] In one embodiment, the rAAV genome comprises a heterologous nucleic acid that encodes a secretory signal peptide (SP) fused to the GAA-fusion polypeptide, where the GAA-fusion polypeptide comprises a targeting peptide (e.g., IGF2 targeting peptide) fused to a GAA polypeptide. As used herein GAA also refers to the modified GAA described above. Accordingly, the signal peptide disclosed herein increases the efficacy of secretion of the GAA polypeptide or IGF2-GAA fusion polypeptide from the cell transduced with the rAAV vector or comprising the rAAV genome as described herein

[0206] Accordingly, in some embodiments, the rAAV genome disclosed herein comprises a 5′ ITR and 3′ ITR sequence, and located between the 5′ITR and the 3′ ITR, a promoter operatively linked to a heterologous nucleic acid encoding a secretory peptide and nucleic acid encoding an alpha-glucosidase (GAA) polypeptide (i.e., the heterologous nucleic acid encodes a GAA fusion polypeptide comprising a signal peptide-GAA polypeptide).

[0207] In alternative embodiments, the rAAV genome disclosed herein comprises a 5′ ITR and 3′ ITR sequence, and located between the 5′ITR and the 3′ ITR, a promoter operatively linked to a heterologous nucleic acid encoding a secretory peptide and nucleic acid encoding an alpha-glucosidase (GAA) fusion polypeptide, where the fusion protein comprises IGF2 targeting peptide and a GAA polypeptide (i.e., the heterologous nucleic acid encodes a GAA fusion polypeptide comprising a signal peptide-IGF2-GAA polypeptide).

[0208] Generally, secretory signal peptides are cleaved within the endoplasmic reticulum and, in some embodiments, the secretory signal peptide is cleaved from the GAA polypeptide prior to secretion. It is not necessary, however, that the secretory signal peptide is cleaved as long as secretion of the GAA polypeptide or IGF2-GAA fusion polypeptide from the cell is enhanced and the GAA polypeptide is functional. Thus, in some embodiments, the secretory signal peptide is partially or entirely retained.

[0209] In some embodiments, the rAAV genome, or an isolated nucleic acid as disclosed herein comprises a nucleic acid encoding a chimeric polypeptide comprising a GAA polypeptide operably linked to a secretory signal peptide, and the chimeric polypeptide is expressed and produced from a cell transduced with the rAAV vector and the GAA polypeptide is secreted from the cell. The GAA polypeptide or GAA fusion polypeptide (e.g., IGF2-GAA fusion polypeptide) can be secreted after cleavage of all or part of the secretory signal peptide. Alternatively, the GAA polypeptide or GAA fusion polypeptide (e.g., IGF2-GAA fusion polypeptide) can retain the secretory signal peptide (i.e., the secretory signal is not cleaved). Thus, in this context, the “GAA polypeptide or GAA fusion polypeptide” can be a chimeric polypeptide comprising the secretory peptide.

[0210] The secretory signal sequences of the invention are not limited to any particular length as long as they direct the polypeptide of interest to the secretory pathway. In representative embodiments, the signal peptide is at least about 6, 8, 10 12, 15, 20, 25, 30 or 35 amino acids in length up to a length of about 40, 50, 60, 75, or 100 amino acids or longer.

[0211] Secretory signal peptide encoded by the rAAV genome and in the rAAV vector as disclosed herein can comprise, consist essentially of or consist of a naturally occurring secretory signal sequence or a modification thereof. Numerous secreted proteins and sequences that direct secretion from the cell are known in the art, are disclosed in U.S. Pat. No. 9,873,868, which is incorporated herein in its entirety by reference. Exemplary secreted proteins (and their secretory signals) include but are not limited to: erythropoietin, coagulation Factor IX, cystatin, lactotransferrin, plasma protease C1 inhibitor, apolipoproteins (e.g., APO A, C, E), MCP-1, α-2-HS-glycoprotein, α-1-microgolubilin, complement (e.g., C1Q, C3), vitronectin, lymphotoxin-α, azurocidin, VIP, metalloproteinase inhibitor 2, glypican-1, pancreatic hormone, clusterin, hepatocyte growth factor, insulin, α-1-antichymotrypsin, growth hormone, type IV collagenase, guanylin, properdin, proenkephalin A, inhibin p (e.g., A chain), prealbumin, angiocenin, lutropin (e.g., R chain), insulin-like growth factor binding protein 1 and 2, proactivator polypeptide, fibrinogen (e.g., R chain), gastric triacylglycerol lipase, midkine, neutrophil defensins 1, 2, and 3, α-1-antitrypsin, matrix gla-protein, α-tryptase, bile-salt-activated lipase, chymotrypsinogen B, elastin, IG lambda chain V region, platelet factor 4 variant, chromogranin A, WNT-1 proto-oncogene protein, oncostatin M, β-neoendorphin-dynorphin, von Willebrand factor, plasma serine protease inhibitor, serum amyloid A protein, nidogen, fibronectin, rennin, osteonectin, histatin 3, phospholipase A2, cartilage matrix Protein, GM-CSF, matrilysin, neuroendocrine protein 7B2, placental protein 11, gelsolin, M-CSF, transcobalamin I, lactase-phlorizin hydrolase, elastase 2B, pepsinogen A, MIP 1-β, prolactin, trypsinogen II, gastrin-releasing peptide II, atrial natriuretic factor, secreted alkaline phosphatase, pancreatic α-amylase, secretogranin I, β-casein, serotransferrin, tissue factor pathway inhibitor, follitropin β-chain, coagulation factor XII, growth hormone-releasing factor, prostate seminal plasma protein, interleukins (e.g., 2, 3, 4, 5, 9, 11), inhibin (e.g., alpha chain), angiotensinogen, thyroglobulin, IG heavy or light chains, plasminogen activator inhibitor-1, lysozyme C, plasminogen activator, antileukoproteinase 1, statherin, fibulin-1, isoform B, uromodulin, thyroxine-binding globulin, axonin-1, endometrial α-2 globulin, interferon (e.g., alpha, beta, gamma), β-2-microglobulin, procholecystokinin, progastricsin, prostatic acid phosphatase, bone sialoprotein II, colipase, Alzheimer's amyloid A4 protein, PDGF (e.g., A or B chain), coagulation factor V, triacylglycerol lipase, haptoglobuin-2, corticosteroid-binding globulin, triacylglycerol lipase, prorelaxin H2, follistatin 1 and 2, platelet glycoprotein IX, GCSF, VEGF, heparin cofactor II, antithrombin-III, leukemia inhibitory factor, interstitial collagenase, pleiotrophin, small inducible cytokine A1, melanin-concentrating hormone, angiotensin-converting enzyme, pancreatic trypsin inhibitor, coagulation factor VIII, α-fetoprotein, α-lactalbumin, senogelin II, kappa casein, glucagon, thyrotropin beta chain, transcobalamin II, thrombospondin 1, parathyroid hormone, vasopressin copeptin, tissue factor, motilin, MPIF-1, kininogen, neuroendocrine convertase 2, stem cell factor procollagen al chain, plasma kallikrein keratinocyte growth factor, as well as any other secreted hormone, growth factor, cytokine, enzyme, coagulation factor, milk protein, immunoglobulin chain, and the like.

[0212] In some embodiments, other secretory signal peptides encoded by the rAAV genome and in the rAAV vector as disclosed herein can be selected from, but are not limited to, the secretory signal sequences from prepro-cathepsin L (e.g., GenBank Accession Nos. KHRTL, NP_037288; NP_034114, AAB81616, AAA39984, P07154, CAA68691; the disclosures of which are incorporated by reference in their entireties herein) and prepro-alpha 2 type collagen (e.g., GenBank Accession Nos. CAA98969, CAA26320, CGHU2S, NP_000080, BAA25383, P08123; the disclosures of which are incorporated by reference in their entireties herein) as well as allelic variations, modifications and functional fragments thereof (as discussed above with respect to the fibronectin secretory signal sequence). Exemplary secretory signal sequences include for preprocathepsin L (Rattus norvegicus, MTPLLLLAVLCLGTALA [SEQ ID NO: 27]; Accession No. CAA68691) and for prepro-alpha 2 type collagen (Homo sapiens, MLSFVDTRTLLLLAVTLCLATC [SEQ ID NO: 28]; Accession No. CAA98969). Also encompassed are longer amino acid sequences comprising the full-length secretory signal sequence from preprocathepsin L and prepro-alpha 2 type collagen or functional fragments thereof (as discussed above with respect to the fibronectin secretory signal sequence).

[0213] In some embodiments, the secretory signal peptide is derived in part or in whole from a secreted polypeptide that is produced by liver cells. In some embodiments, a secretory signal peptide can further be in whole or in part synthetic or artificial. Synthetic or artificial secretory signal peptides are known in the art, see e.g., Barash et al., “Human secretory signal peptide description by hidden Markov model and generation of a strong artificial signal peptide for secreted protein expression,” Biochem. Biophys. Res. Comm. 294:835-42 (2002); the disclosure of which is incorporated herein in its entirety. In particular embodiments, the secretory signal peptide comprises, consists essentially of, or consists of the artificial secretory signal: MWWRLWWLLLLLLLLWPMVWA (SEQ ID NO: 29) or variations thereof having 1, 2, 3, 4, or 5 amino acid substitutions (optionally, conservative amino acid substitutions, conservative amino acid substitutions are known in the art).

[0214] Exemplary signal peptides for use in the methods and compositions as disclosed herein can be selected from any signal peptide disclosed in Table 2, or functional variants thereof. Exemplary signal peptides are Fibronectin (FN1), or AAT. In some embodiments of the methods and compositions disclosed herein, the rAAV vector composition comprises the nucleic acid encoding a secretory signal peptide, e.g., encoding a secretory signal peptide selected from an AAT signal peptide (e.g., SEQ ID NO: 17), a fibronectin signal peptide (FN1) (e.g., SEQ ID NO: 18-21), a GAA signal peptide, an hIGF2 signal peptide (e.g., SEQ ID NO: 22) or an active fragment thereof having secretory signal activity, e.g., a nucleic acid encoding an amino acid sequence that has at least about 75%, or 80%, or 85%, or 90%, or 95%, or 98%, or 99% sequence identity to SEQ ID NOs: 17-22.

[0215] In some embodiments of the methods and compositions as disclosed herein, the nucleic acid encoding the secretory signal is selected from any of SEQ ID NO: 17, 81-21, 22-26, or a nucleic acid sequence at least about 75%, or 80%, or 85%, or 90%, or 95%, or 98%, or 99% sequence identity to any of SEQ ID NOs: 17 or 22-26.

[0216] In some embodiments, one can readily substitute a FN1 or AAT signal peptide with any signal peptide, including signal peptides for over liver expressed proteins, or signal peptides disclosed in U.S. Pat. No. 62,937,556, filed on Nov. 19, 2019, or PCT/US19/61653 filed on Nov. 15, 2019.

[0217] Fibronectin Secretory Signal Peptide:

[0218] In some embodiments, the secretory signal peptide is a fibronectin secretory signal peptide, which term includes modifications of naturally occurring sequences (as described in more detail below).

[0219] In some embodiments, the secretory signal peptide is a fibronectin signal peptide, e.g., a signal sequence of human fibronectin or a signal sequence from rat fibronectin. Fibronectin (FN1) signal sequences and modified FN1 signal peptides encompassed for use in the rAAV genome and rAAV vectors described herein are disclosed in U.S. Pat. No. 7,071,172, which is incorporated herein in its entirety by reference, and in Table 3 of provisional application 62/937,556, filed on Nov. 19, 2019. Examples of exemplary fibronectin secretory signal sequences include, but are not limited to those listed in Table 1 of U.S. Pat. No. 7,071,172, which is incorporated herein in its entirety by reference.

TABLE 2
Exemplary Fibronectin (FN1) secretory signal peptides

| Species | Secretory Signal sequence | Nucleic acid sequence |
|---|---|---|
| H. Sapiens | MLRGPGPGLLLLAVQCLGTAV | ATG CTT AGG GGT CCG GGG CCC GGG CTG |
| | PSTGA (SEQ ID NO: 20) | CTG CTG CTG GCC GTC CAG TGC CTG GGG |
| | | ACA GCG GTG CCC TCC ACG GGA GCC |
| | | (SEQ ID NO: 25) |
| R. | MLRGPGPGRLLLLAVLCLGTSV | 5′-ATGCTCAGGGGTCCGGGACCCGGGCGGCT |
| Norvegicus | RCTETGKSKR (SEQ ID NO: 18) | GCTGCTGCTAGCAGTCCTGTGCCTGGGGAC |
| | | ATCGGTGCGCTGCACCGAAACCGGGAAGA |
| | | GCAAGAGG-3 (SEQ ID NO: 23) |
| | | (nucleotides 208-303) |
| R. | MLRGPGPGRLLLLAVLCLGTSV | 5′-ATG CTC AGG GGT CCG GGA CCC GGG |
| Norvegicus | RCTETGKSKR ↑ LALQIV | CGG CTG CTG CTG CTA GCA GTC CTG TGC |
| | (SEQ ID NO: 19) | CTG GGG ACA TCG GTG CGC TGC |
| | | ACC GAA ACC GGG AAG AGC AAG AGG ↑ |
| | | CAGGCTCAGCAAATCGTG-3′. (SEQ ID |
| | | NO: 24) (↑ denotes the cleavage site) |
| X. laevis | MRRGALTGLLLVLCLSVVLRA | ATG CGC CGG GGG GCC CTG ACC GGG CTG |
| | APSATSKKRR (SEQ ID NO: 21) | CTC CTG GTC CTG TGC CTG AGT GTT GTG |
| | | CTA CGT GCA GCC CCC TCT GCA ACA AGC |
| | | AAG AAG CGC AGG (SEQ ID NO: 26) |

[0220] An exemplary nucleotide sequence encoding the fibronectin secretory signal sequence of Rattus norvegicus is found at GenBank accession number X15906 (the disclosure of which is incorporated herein by reference). As yet another illustrative sequence, the nucleotide sequence encoding the secretory signal peptide of human fibronectin 1, transcript variant 1 (Accession No. NM_002026, nucleotides 268-345; the disclosure of Accession No. NM_002026 is incorporated herein by reference in its entirety). Another exemplary secretory signal sequence is encoded by the nucleotide sequence encoding the secretory signal peptide of the Xenopus laevis fibronectin protein (Accession No. M77820, nucleotides 98-190; the disclosure of Accession No. M77820 incorporated herein by reference in its entirety).

[0221] In another embodiment, the fibronectin signal sequence (FN1, nucleotides 208-303, 5′-ATG CTC AGG GGT CCG GGA CCC GGG CGG CTG CTG CTG CTA GCA GTC CTG TGC CTG GGG ACA TCG GTG CGC TGC ACC GAA ACC GGG AAG AGC AAG AGG-3′, SEQ ID NO: 23) was derived from the rat fibronectin mRNA sequence (Genbank accession 4X15906) and codes for the following peptide signal sequence: Met Leu Arg Gly Pro Gly Pro Gly Arg Leu Leu Leu Leu Ala Val Leu Cys Leu Gly Thr Ser Val Arg Cys Thr Glu Thr Gly Lys Ser Lys Arg (SEQ ID NO: 18). In some embodiments of the methods and compositions disclosed herein, a recombinant AAV vector comprises a heterologous nucleic acid sequence that encodes a secretory signal peptide which is a fibronectin signal peptide (FN 1) or an active fragment thereof having secretory signal activity (e.g., a FN 1 signal peptide has the sequence of any of SEQ ID NO: 18-21, or an amino acid sequence at having at least about 75%, or 80%, or 85%, or 90%, or 95%, or 98%, or 99% sequence identity to any of SEQ ID NOs: 18-21), and the heterologous nucleic acid sequence encodes a IGF2 targeting peptide selected from any of: SEQ ID NO: 5, SEQ ID NO: 6, SEQ ID NO: 7, SEQ ID NO: 8 or SEQ ID NO: 9, or a IGF2 peptide having at least about 75%, or 80%, or 85%, or 90%, or 95%, or 98%, or 99% sequence identity to SEQ ID NOs: 5-9. In some embodiments of the methods and compositions disclosed herein, a recombinant AAV vector comprises a heterologous nucleic acid sequence that encodes a secretory signal peptide is AAT signal peptide or an active fragment thereof having secretory signal activity, (e.g., a AAT signal peptide has the sequence of SEQ ID NO: 17, or an amino acid sequence at having at least about 75%, or 80%, or 85%, or 90%, or 95%, or 98%, or 99% sequence identity to SEQ ID NO: 17), and the heterologous nucleic acid sequence encodes a IGF2 targeting peptide selected from any of: SEQ ID NO: 5, SEQ ID NO: 6, SEQ ID NO: 7, SEQ ID NO: 8 or SEQ ID NO: 9, or a IGF2 peptide having at least about 75%, or 80%, or 85%, or 90%, or 95%, or 98%, or 99% sequence identity to SEQ ID NOs: 5-9.

[0222] Those skilled in the art will appreciate that the secretory signal sequence may encode one, two, three, four, five or all six or more of the amino acids at the C-terminal side of the peptidase cleavage site (identified by an T) (see e.g., SEQ ID NO: 19 and 24 in Table 2). Those skilled in the art will appreciate that additional amino acids (e.g., 1, 2, 3, 4, 5, 6 or more amino acids) on the carboxy-terminal side of the cleavage site may be included in the secretory signal sequence.

[0223] In some embodiments of the methods and compositions disclosed herein, a recombinant AAV vector comprises, or consist of, located between the 5′ ITR and the 3′ ITR, a heterologous nucleic acid sequence that encodes a secretory signal peptide and nucleic acid encoding a hGAA polypeptide, where the nucleic acid sequence that encodes the signal sequence is selected from any of: an AAT signal peptide (e.g., SEQ ID NO: 17), a fibronectin signal peptide (FN1) (e.g., SEQ ID NO: 18-21), a cognate GAA signal peptide (SEQ ID NO: 175), an hIGF2 signal peptide (e.g., SEQ ID NO: 22), a IgG1 leader peptide (SEQ ID NO: 177), wtIL2 leader peptide (SEQ ID NO: 179), mutant IL2 leader peptide (SEQ ID NO: 181) or an active fragment thereof having secretory signal activity, e.g., a nucleic acid encoding an amino acid sequence that has at least about 75%, or 80%, or 85%, or 90%, or 95%, or 98%, or 99% sequence identity to SEQ ID NOs: 17-22, 175, 177, 179 or 181, and where the nucleic acid encoding the signal peptide is located 5′ of a nucleic acid encoding a hGAA polypeptide as disclosed herein, and where the nucleic acid encoding the signal sequence and the hGAA polypeptide are operatively linked to any LSP disclosed herein in Table 4, or a functional variant thereof.

[0224] In embodiments of the invention, the functional fragment has at least about 50%, 70%, 80%, 90% or more secretory signal activity as compared with the sequences specifically disclosed herein or even has a greater level of secretory signal activity.

[0225] Peptidase Cleavage Sites

[0226] In some embodiments, one or more exogenous peptidase cleavage site may be inserted into the secretory signal peptide—GAA fusion polypeptide, e.g., between the secretory signal peptide and the GAA polypeptide. In particular embodiments, an autoprotease (e.g., the foot and mouth disease virus 2A autoprotease) is inserted between the secretory signal peptide and the GAA polypeptide or IGF2-GAA fusion polypeptide. In other embodiments, a protease recognition site that can be controlled by addition of exogenous protease is employed (e.g., Lys-Arg recognition site for trypsin, the Lys-Arg recognition site of the Aspergillus KEX2-like protease, the recognition site for a metalloprotease, the recognition site for a serine protease, and the like). Modification of the GAA polypeptide to delete or inactivate native protease sites is encompassed herein and disclosed in U.S. Provisional Application 62,937,556, filed on Nov. 19, 2019 and International Application PCT/US19/61653, filed Nov. 15, 2019.

### C. IGF2 Targeting Peptide Sequence

[0227] In one embodiment, the rAAV genome comprises a heterologous nucleic acid that encodes a targeting peptide (TP) fused to the GAA polypeptide. In some embodiments, the targeting peptide is a ligand for an extracellular receptor, wherein the targeting peptide binds an extracellular domain of a receptor on the surface of a target cell and, upon internalization of the receptor, permits localization of the polypeptide in a human lysosome. In one embodiment, the targeting peptide includes a urokinase-type plasminogen receptor moiety capable of binding the cation-independent mannose-6-phosphate receptor. In some embodiments, the targeting peptide incorporates one or more amino acid sequences of a IGF2 targeting peptide.

[0228] In some embodiments, the IGF2 targeting peptide as disclosed herein comprises at least part of a ligand for an extracellular receptor, for example, the IGF2 targeting peptide binds to human cation-independent mannose-6-phosphate receptor (CI-MPR) or the IGF2 receptor.

[0229] IGF2 is also known by alias; chromosome 11 open reading frame 43, insulin-like growth factor 2, IGF-II, FLJ44734; IGF2, somatomedin A and preptin. The mRNA of wild-type human IGF2 sequence is corresponds to: GCTTACCGCCCCAGTGAGACCCTGTGCGGCGGGGAGCTGGTGGACACCCTCCAGTTCGTC TGTGGGGACCGCGGCTTCTACTTCAGCAGGCCCGCAAGCCGTGTGAGCCGTCGCAGCCGT GGCATCGTTGAGGAGTGCTGTTTCCGCAGCTGTGACCTGGCCCTCCTGGAGACGTACTGT GCTACCCCCGCCAAGTCCGAG (SEQ ID NO: 1). The full length IGF2 protein (including the IGF2 targeting sequence) is encoded by the nucleic acid sequence of NM_000612.6, and encodes the full length IGF2 protein NP_000603.1.

[0230] The mature human IGF2 targeting peptide is shown below:

(SEQ ID NO: 5)
A Y R P S E T L C G G E L V D T L Q F V C G D R G
F Y F S R P A S R V S R R S R G I V E E C C F R S
C D L A L L E T Y C A T P A K S E

[0231] The coding sequence of human IGF2 is also disclosed in U.S. Pat. No. 8,492,388 (see e.g., FIG. 2) which is incorporated herein in its entirety by reference. IGF2 protein is synthesized as a pre-pro-protein with a 24 amino acid signal peptide at the amino terminus and a 89 amino acid carboxy terminal region both of which are removed post-translationally, reviewed in O'Dell et al. (1998) Int. J. Biochem Cell Biol. 30(7):767-71. The mature protein is 67 amino acids. A Leishmania codon optimized version of the mature IGF2 is disclosed in U.S. Pat. No. 8,492,388 (see, e.g., FIG. 3 of U.S. Pat. No. 8,492,388) (Langford et al. (1992) Exp. Parasitol. 74(3):360-1). Additional cassettes containing a deletion of amino acids 1-7 or 2-7 of the mature polypeptide (A1-7), alteration of residue 27 from tyrosine to leucine (Y27L) or both mutations (A1-7,Y27L or Δ2-7,Y27L) were made to produce IGF-2 cassettes with specificity for only the desired receptor as described below. Accordingly, in some embodiments, the IGF2 targeting sequence can be selected from any of: wildtype, Y27L, Δ1-7, Δ2-7 and Y27L-A1-7, Y27L-Δ2-7, V43M, Y27L-V43M, Y27L-A1-7-V43M, Y27L-Δ2-7-V43M IGF2 variants are encompassed for use herein.

[0232] Exemplary IGF2 targeting peptide for use in the methods and compositions herein are disclosed in U.S. Provisional Application 62,937,556, filed on Nov. 19, 2019 and International Application PCT/US19/61653, filed Nov. 15, 2019, and International application PCT/US19/61701, filed Nov. 15, 2019, each of which are incorporated herein in their entirety by reference.

[0233] In some embodiments, an IGF2 targeting peptide for use in the methods and compositions herein can have a modification of any one or more of: E6R, F26S, Y27L, V43L, F48T, R495, S50I, A54R, L55R, K65R, as disclosed in US application 2019/0343968, which is incorporated herein in its entirety. In some embodiments, the IGF2 targeting peptide has a modification of V43M in addition to one or more modifications selected from: E6R, F26S, Y27L, V43L, F48T, R495, S50I, A54R, L55R and K65R. In some embodiments, the IGF2 targeting peptide has a Δ1-7 or Δ2-7 modification in addition to one or more modifications selected from: E6R, F26S, Y27L, V43L, F48T, R495, S50I, A54R, L55R and K65R. In some embodiments, the IGF2 targeting peptide has a Δ1-7 or Δ2-7 modification, a V43M modification, and one or more modifications selected from: E6R, F26S, Y27L, V43L, F48T, R495, S50I, A54R, L55R and K65R.

[0234] In particular embodiments, the IGF2 targeting peptide comprises a modification at valine 43, where valine is modified to a met (V43M), such that translation initiation starts at amino acid 43. A IGF2 targeting peptide with a modification of V43M encompassed for use herein as a targeting peptide or IGF2 targeting peptide binds the cation-independent mannose-6-phosphate receptor. In alterative embodiments, the IGF2 targeting peptide is delta 1-42 of IGF2 with V43 changed to an Met (i.e., IGF2-A1-42 (SEQ ID NO: 8) or IGF2-V43M (SEQ ID NO:9).

[0235] In some embodiments, the rAAV genome comprises a nucleic acid encoding an IGF2-GAA fusion protein, where the nucleic acid encoding the mature IGF2 targeting peptide (SEQ ID NO: 5) or a IGF2 targeting peptide variant (e.g., SEQ ID NO: 6 (IGF2-Δ2-7); SEQ ID NO: 7 (IGF2-A1-7); SEQ ID NO: 8 (IGF2-Δ1-42), SEQ ID NO: 9 (IGF2-V43M)) or sequences having at least 85%, or 90% or 95% sequence identity to SEQ ID NO: 5-9, is fused to the 5′ end of nucleic acid encoding the GAA protein, fusion proteins (e.g., IGF2-GAA fusion polypeptides) are created that can be taken up by a variety of cell types and transported to the lysosome. Alternatively, a nucleic acid encoding a precursor IGF2 polypeptide can be fused to the 3′ end of a GAA gene; the precursor includes a carboxy-terminal portion that is cleaved in mammalian cells to yield the mature IGF2 polypeptide, but the IGF2 targeting peptide is preferably omitted (or moved to the 5′ end of the GAA gene). This method has numerous advantages over methods involving glycosylation including simplicity and cost effectiveness, because once the protein is isolated, no further modifications need be made.

[0236] In some embodiments, the IGF2 targeting peptide encompassed for use herein is described U.S. Pat. Nos. 7,785,856 and 9,873,868 which are each incorporated herein in their entirety by reference.

### (i) Deletion Mutants of IGF2:

[0237] In some embodiments, the IGF2 targeting peptide is a modified or truncated IGF2 targeting peptide (also referred to as a deletion mutant of IGF2), as disclosed in International Application PCT/US19/61701, filed Nov. 15, 2019, which is incorporated herein in its entirety by reference. For example, in some embodiments, the IGF2 targeting peptide comprises a V43M modification and also any deletion of one or more amino acids from amino acid 1-42. For example, in some embodiments of the methods and compositions as disclosed herein, the IGF2 targeting peptide comprises V43M and further comprises one or more deletions selected from any of: Δ1-3, Δ1-4, Δ1-5, Δ1-6, Δ1-8, Δ1-9, Δ1-10, Δ1-11, Δ1-12, Δ1-13, Δ1-14, Δ1-15, Δ1-16, Δ1-17, Δ1-18, Δ1-19, Δ1-20, Δ1-21, Δ1-22, Δ1-23, Δ1-24, Δ1-25, Δ1-26, Δ1-27, Δ1-28, Δ1-29, Δ1-30, Δ1-31, Δ1-32, Δ1-33, Δ1-34, Δ1-35, Δ1-36, Δ1-37, Δ1-38, Δ1-39, Δ1-40, Δ1-41 or Δ1-42 of SEQ ID NO: 5 and wherein residue 43 of SEQ ID NO: 5 is a methionine (V43M). In some embodiments of the methods and compositions as disclosed herein, the IGF2 targeting peptide comprises V43M and further comprises a Δ1-7 deletion (IGF2-A1-7,V43M).

[0238] In some embodiments of the methods and compositions as disclosed herein, the lysosomal IGF2 targeting peptide further comprises one or more modifications selected from any of: Δ2-3, Δ2-4, Δ2-5, Δ2-6, Δ2-8, Δ2-9, Δ2-10, Δ2-11, Δ2-12, Δ2-13, Δ2-14, Δ2-15, Δ2-16, Δ2-17, Δ2-18, Δ2-19, Δ2- 20, Δ2-21, Δ2-22, Δ2-23, Δ2-24, Δ2-25, Δ2-26, Δ2-27, Δ2-28, Δ2-29, Δ2-30, Δ2-31, Δ2-32, Δ2-33, Δ2-34, Δ2-35, Δ2-36, Δ2-37, Δ2-38, Δ2-39, Δ2-40, Δ2-41 or Δ2-42 of SEQ ID NO: 5 and wherein residue 43 of SEQ ID NO: 5 is a methionine (V43M). In some embodiments of the methods and compositions as disclosed herein, the IGF2 targeting peptide comprises V43M and further comprises a Δ2-7 deletion (IGF2-Δ2-7,V43M).

[0239] In some embodiments, a IGF2 targeting peptide for fusion to a GAA-polypeptide can comprise amino acids 8-28 and 41-61 of IGF2. In some embodiments, these stretches of amino acids can be joined directly or separated by a linker. Alternatively, amino acids 8-28 and 41-61 can be provided on separate polypeptide chains. In some embodiments, amino acids 8-28 of IGF2, or a conservative substitution variant thereof, could be fused to GAA polypeptide to express a IGF2-GAA fusion protein from the rAVV vector, and a separate rAAV vector could express IGF2 amino acids 41-61, or a conservative substitution variant thereof.

[0240] In order to facilitate proper presentation and folding of the IGF2 targeting peptide, longer portions of IGF2 proteins can be used. For example, an IGF2 targeting peptide including amino acid residues 1-67, 1-87, or the entire precursor form can be used.

[0241] In some embodiments, the IGF2 targeting peptide is a nucleic acid sequence that encodes an IGF2 targeting peptide of any of the following: residue 1 followed by residues 8-67 of wild-type mature human insulin-like growth factor II (IGF2) of SEQ ID NO: 5 (i.e., SEQ ID NO: 6; i.e., IGF2-delta 2-7); residues 8-67 of wild-type mature human insulin-like growth factor II (IGF2) of SEQ ID NO: 5 (i.e., SEQ ID NO: 7; IGF2-delta 1-7) or residues 43-67 of wild-type mature human insulin-like growth factor II (IGF2) of SEQ ID NO: 5 (i.e., IGF2-V43M (SEQ ID NO: 9) or IGF-delta 1-42 (SEQ ID NO: 8).

[0242] In some embodiments of the methods and compositions as disclosed herein, the IGF2 targeting peptide is a nucleic acid sequence selected from any nucleic acid sequence comprising any of: SEQ ID NO: 2 (i.e., IGF2-delta 2-7); SEQ ID NO: 3 (i.e., IGF2-delta 1-7) or SEQ ID NO: 4 (i.e., IGF2-V43M) or a sequence at least sequence at least 85%, 90%, 95%, 96%, 97%, 98% or 99% sequence identity thereto.

[0243] In some embodiments of the methods and compositions as disclosed herein, the IGF2(V43M) sequence is a nucleic acid sequence encoding a IGF2(V43M) sequence of any of SEQ ID NO: 65 (IGF2-Δ2-7V43M) or an amino acid sequence having at least 85%, or 90%, or 95% or 96%, or 97%, or 98% or 99% or 100% identity to SEQ ID NO: 65, or SEQ ID NO: 66 (IGFΔ1-7V43M) or an amino acid sequence having at least 85%, or 90%, or 95% or 96%, or 97%, or 98% or 99% or 100% identity to SEQ ID NO: 66.

TABLE 3
Exemplary nucleic acid sequences encoding IGF2 targeting peptide:

| IGF2 targeting | |
|---|---|
| peptide | Sequence |
| IGF2-delta 2-7 | GCT\|CTGTGCGGCGGGGAGCTGGTGGACACCCTCCAGTTCGTCTGTGGGGA |
| (IGFΔ2-7) | CCGCGGCTTCTACTTCAGCAGGCCCGCAAGCCGTGTGAGCCGTCGCAGCC |
| | GTGGCATCGTTGAGGAGTGCTGTTTCCGCAGCTGTGACCTGGCCCTCCTG |
| | GAGACGTACTGTGCTACCCCCGCCAAGTCCGAG) (SEQ ID NO: 2) |
| IGF2-delta 1-7 | CTGTGCGGCGGGGAGCTGGTGGACACCCTCCAGTTCGTCTGTGGGGACCG |
| (IGFΔ1-7) | CGGCTTCTACTTCAGCAGGCCCGCAAGCCGTGTGAGCCGTCGCAGCCGTG |
| | GCATCGTTGAGGAGTGCTGTTTCCGCAGCTGTGACCTGGCCCTCCTGGAG |
| | ACGTACTGTGCTACCCCCGCCAAGTCCGAG (SEQ ID NO: 3) |
| IGF2-V43M | GCTTACCGCCCCAGTGAGACCCTGTGCGGCGGGGAGCTGGTGGACACCCT |
| | CCAGTTCGTCTGTGGGGACCGCGGCTTCTACTTCAGCAGGCCCGCAAGCC |
| | GTGTGAGCCGTCGCAGCCGTGGCATCATGGAGGAGTGCTGTTTCCGCAGC |
| | TGTGACCTGGCCCTCCTGGAGACGTACTGTGCTACCCCCGCCAAGTCCGA |
| | G (SEQ ID NO: 4) |

[0244] In some embodiments, in order to facilitate proper presentation and folding of the IGF2 targeting peptide, longer portions of IGF2 proteins can be used. For example, an IGF2 targeting peptide including amino acid residues 1-67, 1-87, or the entire precursor form can be used.

[0245] In some embodiments of the methods and compositions disclosed herein, the recombinant AAV comprises a heterologous nucleic acid sequence encoding a signal peptide-GAA (SP-GAA) fusion polypeptide further comprises a IGF2 targeting peptide located between the secretory signal peptide (SP) and the an alpha-glucosidase (GAA) polypeptide.

[0246] In some embodiments of the methods and compositions disclosed herein, the recombinant AAV vector comprises a heterologous nucleic acid sequence that encodes a IGF2 targeting peptide which binds human cation-independent mannose-6-phosphate receptor (CI-MPR) or the IGF2 receptor, for example, the heterologous nucleic acid sequence encodes a IGF2 targeting peptide having the amino acid sequence of SEQ ID NO: 5 or comprises at least one amino modification in SEQ ID NO: 5 that binds to the IGF2 receptor. In some embodiments, the recombinant AAV vector comprises a heterologous nucleic acid sequence that encodes a IGF2 targeting peptide that has at least one amino modification in SEQ ID NO: 5 is a V43M amino acid modification (SEQ ID NO: 8 or SEQ ID NO: 9) or Δ2-7 (SEQ ID NO: 6) or Δ1-7 (SEQ ID NO: 7), or is a IGF2 peptide having at least about 75%, or 80%, or 85%, or 90%, or 95%, or 98%, or 99% sequence identity to SEQ ID NOs: 5-9.

[0247] In some embodiments of the methods and compositions disclosed herein, the nucleic acid encoding a IGF2 targeting peptide is selected from any of SEQ ID NO: 2 (IGF2-Δ2-7), SEQ ID NO: 3 (IGF2-Δ1-7), or SEQ ID NO: 4 (IGF2 V43M), or a nucleic acid sequence at least about 75%, or 80%, or 85%, or 90%, or 95%, or 98%, or 99% sequence identity to any of SEQ ID NOs: 2, 3 or 4.

[0248] In some embodiments of the compositions and methods described herein, the IGF2 targeting peptide is a nucleic acid sequence that encodes any of: residue 1 followed by residues 8-67 of wild-type mature human insulin-like growth factor II (IGF2) of SEQ ID NO: 5 (i.e., IGF2-delta 2-7 or IGF2-Δ2-7; which corresponds to SEQ ID NO: 6); residues 8-67 of wild-type mature human insulin-like growth factor II (IGF2) of SEQ ID NO: 5 (i.e., IGF2-delta 1-7 or IGF2A1-7, which corresponds to SEQ ID NO: 7;) or residues 43-67 of wild-type mature human insulin-like growth factor II (IGF2) of SEQ ID NO: 5 (i.e., IGF2 delta 1-42 or IGF2A1-42, which corresponds to SEQ ID NO: 8). In some embodiments of the compositions and methods described herein, the IGF2 targeting peptide is a nucleic acid sequence that has a modification of amino acid residue 43, for example residue 43 is modified to a start codon, for example IGF2-V43M (corresponding to SEQ ID NO: 9).

[0249] In some embodiments of the compositions and methods described herein, the IGF2 targeting peptide is a nucleic acid sequence comprising any of: SEQ ID NO: 2 (i.e., IGF2-delta 2-7); SEQ ID NO: 3 (i.e., IGF2-delta 1-7) or SEQ ID NO: 4 (i.e., IGF2-V43M).

[0250] In some embodiments of the compositions and methods described herein, the fusion protein comprising the GAA polypeptide and a IGF2 targeting peptide comprises amino acid residues 40-952 or residues 70-952 of human acid alpha-glucosidase (GAA) polypeptide (SEQ ID NO: 10) that is attached to an IGF2 targeting peptide that comprises residue 1 followed by residues 8-67 of wild-type mature human insulin-like growth factor II (IGF2) (SEQ ID NO: 5), (that is—residues 2-7 of mature human IGF2 (SEQ ID NO:5) are not present), wherein the IGF2 targeting peptide is linked to amino acid residue 70 of human GAA (SEQ ID NO: 10).

[0251] In some embodiments of the compositions and methods described herein, the fusion protein comprising the GAA polypeptide and a IGF2 targeting peptide comprises amino acid residues 40-952 or residues 70-952 of human acid alpha-glucosidase (GAA) polypeptide (SEQ ID NO: 10) that is attached to an IGF2 targeting peptide that comprises residues 8-67 of wild-type mature human insulin-like growth factor II (IGF2) (SEQ ID NO: 5), (that is—residues 1-7 of mature human IGF2 (i.e., Y R P S E T; SEQ ID NO: 63) are not present), wherein the IGF2 targeting peptide is linked to amino acid residue 70 of human GAA (SEQ ID NO: 10).

[0252] In some embodiments of the compositions and methods described herein, the fusion protein comprising the GAA polypeptide and a IGF2 targeting peptide comprises amino acid residues 40-952 or residues 70-952 of human acid alpha-glucosidase (GAA) (SEQ ID NO: 10) that is attached to a modified IGF2 targeting peptide that comprises residues 43-67 of wild-type mature human insulin-like growth factor II (IGF2) (SEQ ID NO: 5), (where residues 1-42 of mature human IGF2 (SEQ ID NO: 5) are not present), and where the IGF2 targeting peptide is linked to amino acid residue 70 of human GAA (SEQ ID NO: 10).

[0253] In some embodiments of the methods and compositions disclosed herein, a recombinant AAV vector comprises a heterologous nucleic acid sequence that encodes an IGF2 peptide, where the IGF2 peptide sequence is SEQ ID NO: 8 or SEQ ID NO: 9, or a IGF2 peptide having at least about 75%, or 80%, or 85%, or 90%, or 95%, or 98%, or 99% sequence identity to SEQ ID NO: 8 or 9.

### (ii) Modified IGF2 Targeting Peptides and IGF2 Homologues

[0254] In some embodiments, the nucleic acid encoding IGF2 can be modified to diminish their affinity for IGFBPs, and/or decreasing affinity for binding to IGF-I receptor, thereby increasing targeting to the lysosomes and increasing the bioavailability of the fused GAA-polypeptide.

[0255] IGF2 targeting peptide preferably specifically targets and binds to the M6P receptor. Particularly useful are IGF2 targeting peptides which have mutations in the IGF2 polypeptide that result in a protein that binds the CI-MPR/M6P receptor with high affinity while no longer binding the other two receptors with appreciable affinity.

[0256] IGF2(V43M) targeting peptide is preferably targeted specifically to the M6P receptor. Particularly useful are IGF2(V43M) targeting peptides which have mutations in the IGF2 polypeptide that result in a protein that binds the CI-MPR/M6P receptor with high affinity while no longer binding the other two receptors with appreciable affinity.

[0257] The IGF2(V43M) targeting peptide can also be modified to minimize binding to serum IGF-binding proteins (IGFBPs) (Baxter (2000) Am. J. Physiol Endocrinol Metab. 278(6):967-76) and to IGF-I receptor, in order to avoid sequestration of IGF2 constructs. A number of studies have localized residues in IGF-1 and IGF2 necessary for binding to IGF-binding proteins. Constructs with mutations at these residues can be screened for retention of high affinity binding to the M6P/IGF2 receptor and for reduced affinity for IGF-binding proteins. For example, replacing Phe 26 of IGF2 with Ser is reported to reduce affinity of IGF2 for IGFBP-1 and -6 with no effect on binding to the M6P/IGF2 receptor (Bach et al. (1993) J. Biol. Chem. 268(13):9246-54). Other substitutions, such as Ser for Phe 19 and Lys for Glu 9, can also be advantageous. The analogous mutations, separately or in combination, in a region of IGF-I that is highly conserved with IGF2 result in large decreases in IGF-BP binding (Magee et al. (1999) Biochemistry 38(48): 15863-70).

[0258] The IGF2 targeting peptide can also be modified to minimize binding to serum IGF-binding proteins (IGFBPs) and to IGF-I receptor, in order to avoid sequestration of IGF2 constructs.

[0259] In some embodiments, a IGF2 targeting peptide is modified to be furin resistant, i.e., resistant to degradation by furin protease, which recognizes Arg-X-X-Arg cleavage sites. Such IGF2 targeting peptides are disclosed in US application 22012/0213762 which is incorporated herein in its entirety by reference. In some embodiments, a furin resistant IGF2 targeting peptide for use in a rAAV genome as described herein contains a mutation within a region corresponding to amino acids 30-40 (e.g., 31-40, 32-40, 33-40, 34-40, 30-39, 31-39, 32-39, 34-37, 32-39, 33-39, 34-39, 35-39, 36-39, 37-40, 34-40) of SEQ ID NO: 5 (wt IGF2 targeting peptide) can be substituted with any other amino acid or deleted. For example, substitutions at position 34 may affect furin recognition of the first cleavage site. Insertion of one or more additional amino acids within each recognition site may abolish one or both furin cleavage sites. Deletion of one or more of the residues in the degenerate positions may also abolish both furin cleavage sites.

[0260] In some embodiments, a furin-resistant IGF2 targeting peptide contains amino acid substitutions at positions corresponding to Arg37 (R37) or Arg40 (R40) of SEQ ID NO:5. In some embodiments, a furin-resistant IGF2 targeting peptide contains a Lys (K) or Ala (A) substitution at positions Arg37 or Arg40 of SEQ ID NO: 5. Other substitutions are possible, including combinations of Lys and/or Ala mutations at both positions 37 and 40, or substitutions of amino acids other than Lys (K) or Ala (A). In some embodiments, the IGF2 targeting peptide encompassed for use in the rAVV genome as disclosed herein is IGFΔ2-7-K37, or IGFΔ2-7-K40 or IGFΔ1-7-K37 or IGFΔ1-7-K40, indicating that the IGF2 targeting peptides has a deletion of aa 2-7 or 1-7 and a modification of a Arg (R) residue at position 37 to a lysine (i.e., R37K modification) or R40K respectively. In some embodiments, the IGF2 targeting peptide encompassed for use in the rAVV genome as disclosed herein is IGFΔ2-7-K37-K40, or IGFΔ1-7-R37K-R40K indicating that the IGF2 targeting peptides has a deletion of residues 2-7 or residues 1-7 and a modification of a R residue at position 37 and position 40 to lysinines (R37K and R40K). In some embodiments, the IGF2 targeting peptide encompassed for use in the rAVV genome as disclosed herein is selected from any of: IGFΔ2-7-R37A, or IGFΔ2-7-R40A or IGFΔ1-7-R37A or IGFΔ1-7-R40A, IGFΔ2-7-R37A-R40A, or IGFΔ1-7-R37A-R40A. Exemplary constructs for the IGF2 targeting peptide encompassed for use in the rAVV genome as disclosed herein are disclosed in US application 2012/0213762, which is incorporated herein in its entirety by reference.

[0261] In some embodiments, the furin-resistant IGF2 targeting peptide suitable for the invention may contain additional mutations. For example, up to 30% or more of the residues of SEQ ID NO: 5 may be changed (e.g., up to 1%, 2%, 3%, 4%, 5%, 6%, 7%, 8%, 9%, 10%, 11%, 12%, 13%, 14%, 15%, 16%, 17%, 18%, 19%, 20%, 21%, 22%, 23%, 24%, 25%, 26%, 27%, 28%, 29%, 30% or more residues may be changed). Thus, a furin-resistant IGF2 mutein suitable for the invention may have an amino acid sequence at least 70%, including at least 70, 71, 72, 73, 74, 75, 76, 77, 78, 79, 80, 81, 82, 83, 84, 85, 86, 87, 88, 89, 90, 91, 92, 93, 94, 95, 96, 97, 98, 99%, identical to SEQ ID NO: 5.

[0262] Moreover, use of a IGF2 targeting peptide as disclosed herein is also referred to in the art as Glycosylation Independent Lysosomal Targeting (GILT) because the IGF2 targeting peptide replaces M6P as the moiety targeting the lysosomes. Details of the GILT technology are described in U.S. Application Publication Nos. 2003/0082176, 2004/0006008, 2004/0005309, 2003/0072761, 2005/0281805, 2005/0244400, and international publications WO 03/032913, WO 03/032727, WO 02/087510, WO 03/102583, WO 2005/078077, the disclosures of all of which are hereby incorporated by reference.

[0263] Other modifications to the amino acid sequence of the IGF2 targeting peptide for use in the methods and compositions as disclosed herein are disclosed in US provisional application 62,937,556, filed on Nov. 19, 2019 and in PCT application PCT/US19/61653, filed Nov. 15, 2019, both of which are incorporated herein in their entirety by reference.

[0264] IGF2 binds to the IGF2/M6P and IGF-I receptors with relatively high affinity and binds with lower affinity to the insulin receptor. Substitution of IGF2 residues 48-50 (Phe Arg Ser) with the corresponding residues from insulin, (Thr Ser Ile), or substitution of residues 54-55 (Ala Leu) with the corresponding residues from IGF-I (Arg Arg) result in diminished binding to the IGF2/M6P receptor but retention of binding to the IGF-I and insulin receptors (Sakano et al. (1991) J. Biol. Chem. 266(31):20626-35).

[0265] IGF2 binds to repeat 11 of the cation-independent M6P receptor. Indeed, a minireceptor in which only repeat 11 is fused to the transmembrane and cytoplasmic domains of the cation-independent M6P receptor is capable of binding IGF2 (with an affinity approximately one tenth the affinity of the full length receptor) and mediating internalization of IGF2 and its delivery to lysosomes (Grimme et al. (2000) J. Biol. Chem. 275(43):33697-33703). The structure of domain 11 of the M6P receptor is known (Protein Data Base entries 1GP0 and 1GP3; Brown et al. (2002) EMBO J. 21(5):1054-1062). The putative IGF2 binding site is a hydrophobic pocket believed to interact with hydrophobic amino acids of IGF2; candidate amino acids of IGF2 include leucine 8, phenylalanine 48, alanine 54, and leucine 55. Although repeat 11 is sufficient for IGF2 binding, constructs including larger portions of the cation-independent M6P receptor (e.g. repeats 10-13, or 1-15) generally bind IGF2 with greater affinity and with increased pH dependence (see, for example, Linnell et al. (2001) J. Biol. Chem. 276(26):23986-23991).

[0266] Substitution of IGF2 residues Tyr 27 with Leu, or Ser 26 with Phe diminishes the affinity of IGF2 for the IGF-I receptor by 94-, 56-, and 4-fold respectively (Torres et al. (1995) J. Mol. Biol. 248(2):385-401). Deletion of residues 1-7 of human IGF2 resulted in a 30-fold decrease in affinity for the human IGF-I receptor and a concomitant 12-fold increase in affinity for the rat IGF2 receptor (Hashimoto et al. (1995) J. Biol. Chem. 270(30):18013-8). Truncation of the C-terminus of IGF2 (residues 62-67) also appear to lower the affinity of IGF2 for the IGF-I receptor by 5 fold (Roth et al. (1991) Biochem. Biophys. Res. Commun. 181(2):907-14).

[0267] Substitution of IGF2 residue phenylalanine 26 with serine reduces binding to IGFBPs 1-5 by 5-75 fold (Bach et al. (1993) J. Biol. Chem. 268(13):9246-54). Replacement of IGF2 residues 48-50 with threonine-serine-isoleucine reduces binding by more than 100 fold to most of the IGFBPs (Bach et al. (1993) J. Biol. Chem. 268(13):9246-54); these residues are, however, also important for binding to the cation-independent mannose-6-phosphate receptor. The Y27L substitution that disrupts binding to the IGF-I receptor interferes with formation of the ternary complex with IGFBP3 and acid labile subunit (Hashimoto et al. (1997) J. Biol. Chem. 272(44):27936-42); this ternary complex accounts for most of the IGF2 in the circulation (Yu et al. (1999) J. Clin. Lab Anal. 13(4):166-72). Deletion of the first six residues of IGF2 also interferes with IGFBP binding (Luthi et al. (1992) Eur. J. Biochem. 205(2):483-90).

[0268] Studies on IGF-I interaction with IGFBPs revealed additionally that substitution of serine for phenylalanine 16 did not affect secondary structure but decreased IGFBP binding by between 40 and 300 fold (Magee et al. (1999) Biochemistry 38(48):15863-70). Changing glutamate 9 to lysine also resulted in a significant decrease in IGFBP binding. Furthermore, the double mutant lysine 9/serine 16 exhibited the lowest affinity for IGFBPs. The conservation of sequence between this region of IGF-I and IGF2 suggests that a similar effect will be observed when the analogous mutations are made in IGF2 (glutamate 12 lysine/phenylalanine 19 serine).

[0269] In some embodiments, the IGF2(V43M) sequence comprises at least amino acids 48-55; at least amino acids 8-28 and 41-61; or at least amino acids 8-87, or a sequence variant thereof (e.g. R68A) or truncated form thereof (e.g. C-terminally truncated from position 62) that binds the cation-independent mannose-6-phosphate receptor.

[0270] In another embodiment of the invention, the rAAV genome encoding the targeting peptide (e.g., IGF2 targeting peptide) is inserted into the native GAA coding sequence at the junction of the mature 70/76 kDal polypeptide and the C-terminal domain, for example at position 791. This creates a single chimeric polypeptide. In some embodiments, a protease cleavage site may be inserted just downstream of the targeting peptide (e.g., IGF2 targeting peptide).

[0271] In one embodiment, a targeting peptide, e.g., IGF2 targeting peptide as defined herein, is fused directly to the N- or C-terminus of the GAA polypeptide. In another embodiment, a IGF2 targeting peptide is fused to the N- or C-terminus of the GAA polypeptide by a spacer. In one specific embodiment, a IGF2 targeting peptide is fused to the GAA polypeptide by a spacer of 10-25 amino acids. In another embodiment, a IGF2 targeting peptide is fused to the GAA polypeptide by a spacer including glycine residues.

[0272] In some embodiments, a IGF2 targeting peptide is fused to the GAA polypeptide by a spacer of at least 1, 2, or 3 amino acids. In some embodiments, the spacer comprises amino acids GAP or Gly-Ala-Pro (SEQ ID NO: 31), or an amino acid sequence at least 50% identical thereto. In some embodiments, the spacer is GGG or GA or AP, or GP or variants thereof. In some embodiments, the spacer is encoded by nucleic acids GGC GCG CCG (SEQ ID NO: 30).

[0273] In some embodiments, a IGF2 targeting peptide is fused to the GAA polypeptide by a spacer including a helical structure. In another specific embodiment, a IGF2 targeting peptide is fused to the GAA polypeptide by a spacer at least 50% identical to the sequence GGGTVGDDDDK (SEQ ID NO: 35). In some embodiments of the methods and compositions as disclosed herein, the spacer is SEQ ID NO: 31 (encoded by nucleic acids of SEQ ID NO: 30). In some embodiments of the methods and compositions as disclosed herein, the spacer is selected from any of: SEQ ID NO: 31, SEQ ID NO: 32, SEQ ID NO: 33, SEQ ID NO: 34 or SEQ ID NO: 35, or a sequence at least sequence at least 85%, 90%, 95%, 96%, 97%, 98% or 99% sequence identity thereto.

(iii) Alternative Targeting Peptides that Bind to the Cation-Independent M6P Receptor (CI-MPR).

[0274] In some embodiments, the targeting peptide is a lysosomal targeting peptide or protein, or other moiety other than the IGF2 targeting peptide disclosed herein that binds to the cation independent M6P/IGF2 receptor (CI-MPR) in a mannose-6-phosphate-independent manner. The CI-MPR also contains binding sites for at least three distinct ligands that can be used as targeting peptides. As disclosed herein, IGF2 ligand binds to CI-MPR with a dissociation constant of about 14 nM at or about pH 7.4, primarily through interactions with repeat 11. The CI-MPR is capable of binding high molecular weight O-glycosylated IGF2 forms. Accordingly, in some embodiments, the IGF2 targeting peptide can be post-transcriptionally modified to comprises O-glycosylation.

[0275] In an alternative embodiment, the targeting peptide that binds to CI-MPR is retinoic acid. Retinoic acid binds to the receptor with a dissociation constant of 2.5 nM. Affinity photolabeling of the cation-independent M6P receptor with retinoic acid does not interfere with IGF2 or M6P binding to the receptor, indicating that retinoic acid binds to a distinct site on the receptor. Binding of retinoic acid to the receptor alters the intracellular distribution of the receptor with a greater accumulation of the receptor in cytoplasmic vesicles and also enhances uptake of M6P modified β-glucuronidase. Retinoic acid has a photoactivatable moiety that can be used to link it to a therapeutic agent without interfering with its ability to bind to the cation-independent M6P receptor.

[0276] The urokinase-type plasminogen receptor (uPAR) also binds CI-MPR with a dissociation constant of 9 μM. uPAR is a GPI-anchored receptor on the surface of most cell types where it functions as an adhesion molecule and in the proteolytic activation of plasminogen and TGF-3. Binding of uPAR to the CI-M6P receptor targets it to the lysosome, thereby modulating its activity. Thus, fusing the extracellular domain of uPAR, or a portion thereof competent to bind the cation-independent M6P receptor, to a therapeutic agent permits targeting of the agent to a lysosome.

### D. Spacer and Fusion Junction of the GAA Polypeptide

[0277] Where GAA is expressed as a fusion protein with a secretory signal peptide (e.g., SS-GAA fusion polypeptide) or with a targeting peptide (i.e., SS-IGF2-GAA polypeptide double fusion polypeptide), the signal peptide or IGF2 targeting peptide can be fused directly to the GAA polypeptide or can be separated from the GAA polypeptide by a linker. An amino acid linker (also referred to herein as a “spacer”) incorporates one or more amino acids other than that appearing at that position in the natural protein. Spacers can be generally designed to be flexible or to interpose a structure, such as an a-helix, between the two protein moieties.

[0278] Accordingly, in some embodiments of the methods and compositions disclosed herein, a recombinant AAV vector comprises a heterologous nucleic acid sequence encoding an IGF2-GAA fusion polypeptide, wherein the IGF2-GAA fusion protein further comprises a spacer comprising a nucleotide sequence of at least 1 amino acid in length, which is located N-terminal to the GAA polypeptide, and C-terminal to the IGF2 targeting peptide. In some embodiments of the methods and compositions disclosed herein, a recombinant AAV vector comprises a heterologous nucleic acid sequence that comprises a nucleic acid encoding a spacer of at least 1 amino acids located between the nucleic acid encoding the IGF2 targeting peptide and the nucleic acid encoding the GAA polypeptide.

[0279] In one embodiment, the IGF2 targeting peptide is fused directly to the N- or C-terminus of the GAA polypeptide. In another embodiment, a IGF2 targeting peptide is fused to the N- or C-terminus of the GAA polypeptide by a spacer. In one specific embodiment, a IGF2 targeting peptide is fused to the GAA polypeptide by a spacer of 10-25 amino acids. In another specific embodiment, a IGF2 targeting peptide is fused to the GAA polypeptide by a spacer including glycine residues. In another specific embodiment, a IGF2 targeting peptide is fused to the GAA polypeptide by a spacer including a helical structure. In another specific embodiment, a IGF2 targeting peptide is fused to the GAA polypeptide by a spacer at least 50% identical to the sequence GGGTVGDDDDK (SEQ ID NO: 35).

[0280] In some embodiments, a spacer or linker can be relatively short, e.g., at least 1, 2, 3, 4 or 5 amino acids, or such as the sequence Gly-Ala-Pro (SEQ ID NO: 31) or Gly-Gly-Gly-Gly-Gly-Pro (SEQ ID NO: 32), or can be longer, such as, for example, 5-10 amino acids in length or 10-25 amino acids in length. For example, flexible repeating linkers of 3-4 copies of the sequence (GGGGS (SEQ ID NO:33)) and a-helical repeating linkers of 2-5 copies of the sequence (EAAAK (SEQ ID NO:34)) have been described (Arai et al. (2004) Proteins: Structure, Function and Bioinformatics 57:829-838).

[0281] The use of another linker, GGGTVGDDDDK (SEQ ID NO: 35), in the context of an IGF2 fusion protein has also been reported (DiFalco et al. (1997) Biochem. J. 326:407-413) and is encompassed for use. Linkers incorporating an a-helical portion of a human serum protein can be used to minimize immunogenicity of the linker region.

[0282] In some embodiments, the spacer is encoded by nucleic acids GGC GCG CCG (SEQ ID NO: 30) which encodes the amino acid spacer comprising amino acids GAP or Gly-Ala-Pro (SEQ ID NO: 31).

[0283] The site of a fusion junction in the GAA polypeptide to fuse with either the signal peptide (to generate a SS-GAA fusion protein) or with the targeting peptide (e.g., to generate a SP-IGF2-GAA double fusion polypeptide) should be selected with care to promote proper folding and activity of each polypeptide in the fusion protein and to prevent premature separation of a signal peptide from a GAA polypeptide.

[0284] In some embodiments, a IGF2 targeting peptide is fused to the GAA polypeptide by a spacer including a helical structure. In another specific embodiment, a IGF2 targeting peptide is fused to the GAA polypeptide by a spacer at least 50% identical to the sequence GGGTVGDDDDK (SEQ ID NO: 35). In some embodiments of the methods and compositions as disclosed herein, the spacer is SEQ ID NO: 31 (encoded by nucleic acids of SEQ ID NO: 30). In some embodiments of the methods and compositions as disclosed herein, the spacer is selected from any of: SEQ ID NO: 31, SEQ ID NO: 32, SEQ ID NO: 33, SEQ ID NO: 34 or SEQ ID NO: 35.

[0285] Four exemplary strategies for creating a IGF2-GAA fusion protein can be generated, which are disclosed in provisional application 62,937,556, filed on Nov. 19, 2019, and in PCT/US19/61653, filed Nov. 15, 2019, which are incorporated herein in their entirety by reference.

[0286] In some embodiments, a targeting peptide (e.g., a IGF2 targeting peptide) can be fused, directly or by a spacer, to amino acid 40 or amino acid 70 of GAA, a position permitting expression of the protein, catalytic activity of the GAA protein, and proper targeting by the IGF2 targeting peptide as described herein in the Examples. Alternatively, a targeting peptide (e.g., a IGF2 targeting peptide) can be fused at or near the cleavage site separating the C-terminal domain of GAA from the mature polypeptide. This permits synthesis of a GAA protein with an internal targeting peptide (e.g., a IGF2 targeting peptide), which optionally can be cleaved to liberate the mature polypeptide or the C-terminal domain from the targeting domain, depending on placement of cleavage sites. Alternatively, the mature polypeptide can be synthesized as a fusion protein at about position 791 without incorporating C-terminal sequences in the open reading frame of the expression construct.

[0287] In order to facilitate folding of the IGF2 targeting peptide, GAA amino acid residues adjacent to the fusion junction can be modified. For example, since it is possible that GAA cysteine residues may interfere with proper folding of the targeting peptide (e.g., a IGF2 targeting peptide), the terminal GAA cysteine 952 can be deleted or substituted with serine to accommodate a C-terminal targeting peptide (e.g., a IGF2 targeting peptide). The targeting peptide (e.g., a IGF2 targeting peptide) can also be fused immediately preceding the final Cys952. The penultimate cys938 can be changed to proline in conjunction with a mutation of the final Cys952 to serine.

### E. CS Sequence

[0288] In some embodiments of the methods and compositions disclosed herein, a recombinant AAV vector comprises a heterologous nucleic acid sequence that further comprises at collagen stability (CS) sequence located 3′ of the nucleic acid encoding the GAA polypeptide and 5′ of the 3′ ITR sequence. In some embodiments, the rAAV genome disclosed herein comprises a heterologous nucleic acid sequence that can optionally comprise a Collagen stability sequence (CS or CSS), which is positioned 3′ of the GAA gene and 5′ of a polyA signal. In some embodiments, the CS sequence can be replaced by a 3′ UTR sequence as disclosed herein.

[0289] Exemplary collagen stability sequences include CCCAGCCCACTTTTCCCCAA (SEQ ID NO: 65) or a sequence at least 85%, 90%, 95%, 96%, 97%, 98% or 99% sequence identity thereto. An exemplary collagen stability sequence can have an amino acid sequence of P S P L F P (SEQ ID NO: 66) or an amino acid sequence having at least 85%, 90%, 95%, 96%, 97%, 98% or 99% sequence identity thereto. CS sequences are disclosed in Holick and Liebhaber, Proc. Nat. Acad. Sci. 94: 2410-2414, 1997 (See, e.g. FIG. 3, p. 5205), which is incorporated herein its entirety by reference.

### F. Promoters

[0290] In some embodiments, to achieve appropriate levels of GAA expression, the rAAV genotype comprises a liver specific promoter (LSP). A LSP enables expression of the operatively linked gene in the liver, and can in some embodiments, be and inducible LSP. In an embodiment, a LSP is located upstream 5′ and is operatively linked to the heterologous nucleic acid sequence encoding the GAA protein. Exemplary liver-specific promoters are disclosed herein, and include for example, the LSP comprising SEQ ID NO: 86, 91-96 or 146-150, or functional variant or functional fragment thereof, or any LSP listed in Table 4 herein, or a functional fragment or functional variants thereof. In some embodiments of the compositions and methods disclosed herein, a liver-specific promoter includes a liver-specific cis-regulatory element (CRE), a synthetic liver-specific cis-regulatory module (CRM) or a synthetic liver-specific promoter is selected from any of SEQ ID NO: 270-341 (minimal LSP with CRM) or SEQ ID NO: 342-430 (synthetic liver specific proximal promoters) disclosed in Table 4 herein). In some embodiments, an rAAV vector genome can include one or more constitutive promoters, such as viral promoters or promoters from mammalian genes that are generally active in promoting transcription.

### (i) Synthetic Liver-Specific Promoters

[0291] In some embodiments of the methods and compositions as disclosed herein, the promoter is a liver specific promoter, and can be selected from promoters including, but not limited to, those listed in Table 4 disclosed herein or functional variants thereof, and or any selected from Tables 4A and 4B of U.S. provisional application 62,937,556, filed on Nov. 19, 2019, or functional variants thereof.

[0292] While transthyretin promoter (TTR) (SEQ ID NO: 431) and SP0412 (SEQ ID NO: 91) and SP0422 (SEQ ID NO: 92) are used as an exemplary liver specific promoters (see Examples 1, 12 and 13) in the specification and Examples, one of ordinary skill in the art can readily replace TTR with any liver specific promoter as disclosed herein in Table 4 or functional variants thereof, and or any selected from Tables 4A and 4B of U.S. provisional application 62,937,556, filed on Nov. 19, 2019, or functional variants thereof. A liver-specific promoter can comprise a liver-specific cis-regulatory element (CRE), a synthetic liver-specific cis-regulatory module (CRM) or a synthetic liver-specific promoter as disclosed herein, in Tables 4A and 4B of U.S. provisional application 62,937,556, filed on Nov. 19, 2019, or functional variants thereof.

[0293] Table 4 shows exemplary liver-specific promoters. The relatively small size of liver-specific promoters disclosed herein is advantageous because it takes up the minimal amount of the payload of the vector. This is particularly important when a LSP is used in a vector with limited capacity, such as an AAV-based vector.

[0294] Table 4: Exemplary LSP identified by SEQ ID NOs for use in the methods and compositions as disclosed herein

TABLE 4
Exemplary LSP

| SEQ ID | |
|---|---|
| NO: | Name of LSP |
| 270 | CRM_SP0107 |
| 271 | CRM_SP0109 |
| 273 | CRM_SP0111 |
| 274 | CRM_SP0112 |
| 275 | CRM_SP0113 |
| 276 | CRM_SP0115 |
| 277 | CRM_SP0116 |
| 278 | CRM_SP0121 |
| 279 | CRM_SP0124 |
| 280 | CRM_SP0127 |
| | (CRM_LVR_127) |
| 281 | CRM_SP0127_A1 |
| | (CRM_LVR_127_A1) |
| 282 | CRM_SP0127V1 |
| | (CRM_LVR_127_V1) |
| 283 | CRM_SP0127V2 |
| | (CRM_LVR_127_V2) |
| 284 | CRM_SP0128 |
| 285 | CRM_SP0131 |
| | (CRM_LVR_131) |
| 286 | CRM_SP0132 |
| | (CRM_LVR_132) |
| 287 | CRM_SP0133 |
| | (CRM_LVR_133) |
| 288 | CRM_SP0155 |
| 289 | CRM_SP0158 |
| 290 | CRM_SP0163 |
| 291 | CRM_SP0236 |
| 292 | CRM_SP0239 |
| 293 | CRM_SP0240 |
| 294 | CRM_SP0241 |
| 295 | CRM_SP0242 |
| 296 | CRM_SP0243 |
| 297 | CRM_SP0244 |
| 298 | CRM_SP0246 |
| 299 | CRM_SP0247 |
| 300 | CRM_SP0248 |
| 301 | CRM_SP0249 |
| 302 | CRM_SP0250 |
| 303 | CRM_SP0251 |
| 304 | CRM_SP0252 |
| 305 | CRM_SP0253 |
| 306 | CRM_SP0254 |
| 307 | CRM_SP0255 |
| 308 | CRM_SP0256 |
| 309 | CRM_SP0257 |
| 310 | CRM_SP0258 |
| 311 | CRM_SP0259 |
| 312 | CRM SP0264 |
| 313 | CRM_SP0265 |
| | (CRM_LVR_131_A1) |
| 314 | CRM_SP0266 |
| | (CRM_LVR_131_V1) |
| 315 | CRM_SP0267 |
| | (CRM_LVR_131_V2) |
| 316 | CRM_SP0268 |
| | (CRM_LVR_132_A1) |
| 317 | CRM_SP0269 |
| | (CRM_LVR_132_V1) |
| 318 | CRM_SP0270 |
| | (CRM_LVR_132_V2) |
| 319 | CRM_SP0271 |
| | (CRM_LVR_133_A1) |
| 320 | CRM_SP0272 |
| | (CRM LVR_133_V1) |
| 321 | CRM_SP0273 |
| | (CRM_LVR_133_V2) |
| 322 | CRM_SP0368 |
| 323 | CRM_SP0373 |
| 324 | CRM_SP0378 |
| 325 | CRM_SP0379 |
| 326 | CRM_SP0380 |
| 327 | CRM_SP0381 |
| 328 | CRM_SP0384 |
| 329 | CRM_SP0388 |
| 330 | CRM_SP0396 |
| 331 | CRM_SP0397 |
| 332 | CRM_SP0398 |
| 333 | CRM_SP0399 |
| 334 | CRM_SP0403 |
| 335 | CRM_SP0404 |
| 336 | CRM_SP0405 |
| 337 | CRM_SP0406 |
| 338 | CRM_SP0407 |
| 339 | CRM_SP0409 |
| 340 | CRM_SP0411 |
| 86 | CRM_SP0412 |
| 341 | CRM_SP0413 |
| 342 | SP0107 |
| 343 | SP0109 |
| 344 | SP0111 |
| 345 | SP0112 |
| 346 | SP0113 |
| 347 | SP0115 |
| 348 | SP0116 |
| 349 | SP0121 |
| 350 | SP0124 |
| 351 | SP0127 |
| | (LVR_SP127) |
| 352 | SP0127A1 |
| | (LVR_SP127_A1) |
| 353 | SP0127V1 |
| | (LVR_SP127_V1) |
| 354 | SP0127V2 |
| | (LVR_SP127_V2) |
| 355 | SP0128 |
| 356 | SP0131 |
| | (LVR_SP131) |
| 357 | SP0132 |
| | (LVR_SP132) |
| 358 | SP0133 |
| | (LVR_SP133) |
| 359 | SP0155 |
| 360 | SP0158 |
| 361 | SP0163 |
| 362 | SP0236 |
| 93 | SP0239 |
| 95 | SP0240 |
| 363 | SP0241 |
| 364 | SP0242 |
| 365 | SP0243 |
| 366 | SP0244 |
| 96 | SP0246 |
| 367 | SP0247 |
| 368 | SP0248 |
| 369 | SP0249 |
| 370 | SP0250 |
| 371 | SP0251 |
| 372 | SP0252 |
| 373 | SP0253 |
| 374 | SP0254 |
| 375 | SP0255 |
| 376 | SP0256 |
| 377 | SP0257 |
| 378 | SP0258 |
| 379 | SP0259 |
| 380 | SP0264 |
| 94 | SP0265 |
| | (LVR_SP131_A1) |
| 381 | SP0266 |
| | (LVR_SP131_V1) |
| 382 | SP0267 |
| | (LVR_SP131_V2) |
| 383 | SP0268 |
| | (LVR_132_A1) |
| 384 | SP0269 |
| | (LVR_132_V1) |
| 385 | SP0270 |
| | (LVR_132_V2) |
| 386 | SP0271 |
| | (LVR_133_A1) |
| 387 | SP0272 |
| | (LVR_133_V1) |
| 388 | SP0273 |
| | (LVR_133_V2) |
| 389 | SP0256 |
| 390 | SP0257 |
| 391 | SP0258 |
| 392 | SP0259 |
| 393 | SP0264 |
| 394 | SP0265 |
| | (LVR_SP131_A1) |
| 395 | SP0266 |
| | (LVR_SP131_V1) |
| 396 | SP0267 |
| | (LVR_SP131_V2) |
| 397 | SP0268 |
| | (LVR_132_A1) |
| 398 | SP0269 |
| | (LVR_132_V1) |
| 399 | SP0270 |
| | (LVR_132_V2) |
| 400 | SP0271 |
| | (LVR_133_A1) |
| 401 | SP0272 |
| | (LVR_133_V1) |
| 402 | SP0273 |
| | (LVR_133_V2) |
| 403 | SP0368 |
| 404 | SP0373 |
| 405 | SP0378 |
| 406 | SP0379 |
| 407 | SP0380 |
| 408 | SP0381 |
| 409 | SP0272 |
| | (LVR_133_V1) |
| 410 | SP0273 |
| | (LVR_133_V2) |
| 411 | SP0368 |
| 412 | SP0373 |
| 413 | SP0378 |
| 414 | SP0379 |
| 415 | SP0380 |
| 416 | SP0381 |
| 417 | SP0384 |
| 418 | SP0388 |
| 419 | SP0396 |
| 420 | SP0397 |
| 421 | SP0398 |
| 422 | SP0399 |
| 423 | SP0403 |
| 424 | SP0404 |
| 425 | SP0405 |
| 426 | SP0406 |
| 427 | SP0407 |
| 428 | SP0409 |
| 429 | SP0411 |
| 91 | SP0412 |
| 92 | SP0422 |
| 146 | SP0265-UTR |
| 147 | SP0239-UTR |
| 148 | SP0240-UTR |
| 149 | SP0246-UTR |
| 150 | SP0131-A1-UTR |
| 430 | SP0413 |
| 431 | TTR promoter |
| 432 | LP1 |
| 433 | CMV-IE |
| 434 | CBA |
| 435 | TBG promoter |

### (ii) Functional Variants of Liver-Specific Promoters

[0295] In some embodiments, the synthetic liver-specific promoter useful in the methods and compositions as disclosed herein is a bi-specific, or tri-specific promoter as defined herein. As an illustrative example, a liver bi-specific promoter is active in the liver and one other tissue, for example, the muscle. Additionally, another illustrative example of a liver bi-specific promoter is active in the liver and one other tissue, e.g., the brain. As an illustrative example of a liver tri-specific promoter is active in the liver and two other tissues, for example, the muscle and brain. Additionally, another illustrative example of a liver tri-specific promoter is active in the liver and two other tissues, such as, e.g., the kidney and muscle.

[0296] In some embodiments, a synthetic liver specific promoter that is at least 50%, 60%, 70%, 80%, 90% or 95% identical to any of SEQ ID NO: 86, 91-96, 146-150, 270-430 comprises a source regulatory nucleic acid sequence which is preferentially active in liver, and is also active to a lesser extent (e.g., <50%, or about 49-40%, or about 39-30%, or about 29-20% or about 19-10% or <10% of total expression) in a second type of cell or tissue, e.g., muscle or CNS.

[0297] In some embodiments, the promoter is a synthetic liver-specific promoter comprising a combination of the cis-regulatory elements (CREs) CRE0051 (SEQ ID NO: 97) and CRE0042 (SEQ ID NO: 104), or functional variants thereof. Functional variants thereof may have a sequence that is at least 60%, 65%, 70%, 75%, 80%, 85%, 90%, 95%, 96%, 97%, 98%, or 99% identical thereto. Typically, the CREs are operably linked to a promoter element. In some preferred embodiments, the liver-specific promoter comprises said CREs, or functional variants thereof, in the order CRE0051 (SEQ ID NO: 97), CRE0042 (SEQ ID NO: 104), and then the promoter element (order is given in an upstream to downstream direction, as is conventional in the art).

[0298] The promoter element can be any suitable proximal promoter or minimal promoter. In some embodiments, the promoter element is a minimal promoter. Where the promoter is a proximal promoter, it is generally preferred that the proximal promoter is liver-specific.

[0299] In some preferred embodiments, the promoter element is CRE0059 (SEQ ID NO: 110), or a functional variant thereof. CRE0059 is a proximal promoter, as is discussed further below.

[0300] Thus, in one embodiment the promoter comprises the following regulatory elements: CRE0051 (SEQ ID NO: 97), CRE0042 (SEQ ID NO: 104) and CRE0059 (SEQ ID NO: 110), or functional variants thereof.

[0301] Functional variants of CRE0051 (SEQ ID NO: 97) are regulatory elements with sequences which vary from CRE0051, but which substantially retain activity as liver-specific CREs. It will be appreciated by the skilled person that it is possible to vary the sequence of a CRE while retaining its ability to bind to the requisite transcription factors (TFs) and enhance expression. A functional variant can comprise substitutions, deletions and/or insertions compared to a reference CRE, provided they do not render the CRE substantially non-functional.

[0302] In some embodiments, a functional variant of CRE0051 can be viewed as a CRE which, when substituted in place of CRE0051 in a promoter, substantially retains its activity. For example, a liver-promoter which comprises a functional variant of CRE0051 substituted in place of CRE0051 preferably retains 80% of its activity, more preferably 90% of its activity, more preferably 95% of its activity, and yet more preferably 100% of its activity. For example, considering promoter SP0412 (SEQ ID NO: 91) as an example, CRE0051 in SP0412 can be replaced with a functional variant of CRE0051, and the promoter substantially retains its activity. Retention of activity can be assessed by comparing expression of a suitable reporter under the control of the reference promoter with an otherwise identical promoter comprising the substituted CRE under equivalent conditions.

[0303] In some embodiments the functional variant of CRE0051 comprises transcription factor binding sites (TFBS) for the same liver-specific TFs as CRE0051. The liver-specific TFBS present in CRE0051, listed in the order in which they are present, are: HNF1 (SEQ ID NO: 98), HNF4 (SEQ ID NO: 99), HNF3 (SEQ ID NO: 100), HNF1′ (SEQ ID NO: 101) and HNF3′ (SEQ ID NO: 102), see Table 5. The functional variant of CRE0051 thus preferably comprises all of these TFBS. Preferably, they are present in the same order that they are present in CRE0051, i.e. in the order HNF1 (SEQ ID NO: 98), HNF4 (SEQ ID NO: 99), HNF3 (SEQ ID NO: 100), HNF1′ (SEQ ID NO: 101) and HNF3′ (SEQ ID NO: 102). When the cis-regulatory element is associated with a promoter and gene, this order is preferably considered in an upstream to downstream direction (i.e. in the direction from distal from the transcription start site (TSS) to proximal to the TSS). Spacer sequences may be provided between adjacent TFBS. In some embodiments the TFBS may suitably overlap, provided they remain functional, i.e. overlapping sequences are both able to bind their respective TFs to the extent required to regulate expression.

[0304] In some embodiments the functional variant of CRE0051 (SEQ ID NO: 97) comprises the following TFBS sequences: GTTAATTTTTAAA (HNF1) (SEQ ID NO: 98), GTGGCCCTTGG (HNF4) (SEQ ID NO: 99), TGTTTGC (HNF3) (SEQ ID NO: 100), TGGTTAATAATCTCA (HNF1′) (SEQ ID NO: 101) then ACAAACA (HNF3) (SEQ ID NO: 102), sequences complementary thereto, or functional variants of these TFBS sequences that maintain the ability to bind to their respective TF. These may be present in the same order as CRE0051, i.e. the order in which they are set out above. It is well-known in the art that there is sequence variability associated with TFBS, and that for a given TFBS there is typically a consensus sequence, from which some degree of deviation is typically present. Further information about the variation that occurs in a TFBS can be illustrated using a positional weight matrix (PWM), which represents the frequency with which a given nucleotide is typically found at a given location in the consensus sequence. Details of TF consensus sequences and associated PWMs can be found in, for example, the Jaspar or Transfac databases (http://jaspar.genereg.net/ and http://gene-regulation.com/pub/databases.html). This information allows the skilled person to modify the sequence in any given TFBS of a CRE in a manner which retains, and in some cases even increases, CRE functionality.

[0305] In some embodiments, the functional variant of CRE0051 comprises the sequence:

[0306] GTTAATTTTTAAA-Na-GTGGCCCTTGG-Nb-TGTTTGC-Nc-TGGTTAATAATCTCA-Nd-ACAAACA (SEQ ID NO: 103), or a sequence that is at least 70%, 80%, 90%, 95% or 99% identical thereto, wherein Na, Nb, Nc, and Nd represent optional spacer sequences. When present, Na optionally has a length of from 10 to 26 nucleotides, preferably from 14 to 22 nucleotides, and more preferably 18 nucleotides. When present, Nb optionally has a length of from 8 to 22 nucleotides, preferably from 12 to 20 nucleotides, more preferably 16 nucleotides. When present, Nc optionally has a length of from 1 to 10 nucleotides, preferably 1 to 5 nucleotides, and more preferably 2 nucleotides. When present, Nd suitably has a length of from 1 to 13 nucleotides, preferably from 2 to 9 nucleotides in length, and more preferably 5 nucleotides in length.

[0307] In some embodiments, the CRE consists of SEQ ID No: 98-102 or a functional variant thereof.

[0308] It will be noted that the CRE or functional variant thereof can be provided on either strand of a double stranded polynucleotide and can be provided in either orientation. As such, complementary and reverse complementary sequences of SEQ ID NO: 97-102 or a functional variant thereof fall within the scope of the invention. Single stranded nucleic acids comprising the sequence according to SEQ ID NO: 97 or 103 or a functional variant thereof also fall within the scope of the invention.

[0309] In some embodiments, the CRE comprising or consisting of CRE0051 (SEQ ID NO: 97), or a functional variant thereof, has a length of 200 or fewer nucleotides, 150 or fewer nucleotides, 125 or fewer nucleotides, or 100 or fewer nucleotides.

[0310] In some embodiments, the CRE comprising or consisting of CRE0042 (SEQ ID NO: 104) or a functional variant thereof, has a length of 200 or fewer nucleotides, 150 or fewer nucleotides, 125 or fewer nucleotides, or 100 or fewer nucleotides. Functional variants thereof may have a sequence that is at least 60%, 65%, 70%, 75%, 80%, 85%, 90%, 95%, 96%, 97%, 98%, or 99% identical thereto.

[0311] Functional variants of CRE0042 (SEQ ID NO: 104) are regulatory elements with sequences which vary from CRE0042, but which substantially retain their activity as liver-specific CREs. It will be appreciated by the skilled person that it is possible to vary the sequence of a CRE while retaining its ability to bind to the requisite transcription factors (TFs) and enhance expression. A functional variant can comprise substitutions, deletions and/or insertions compared to a reference CRE, provided they do not render the CRE substantially non-functional.

[0312] In some embodiments, a functional variant of CRE0042 (SEQ ID NO: 104) can be viewed as a CRE which, when substituted in place of CRE0042 in a promoter, substantially retains its activity. For example, a promoter which comprises a functional variant of CRE0042 substituted in place of CRE0042 preferably retains 80% of its activity, more preferably 90% of its activity, more preferably 95% of its activity, and yet more preferably 100% of its activity (compared to the reference promoter comprising CRE0042 (SEQ ID NO: 104)). For example, considering promoter SP0412 as an example, CRE0042 (SEQ ID NO: 104) in SP412 (SEQ ID NO: 91) can be replaced with a functional variant of CRE0042, and the promoter substantially retains its activity. Retention of activity can be assessed by comparing expression of a suitable reporter under the control of the reference promoter with an otherwise identical promoter comprising the substituted CRE under equivalent conditions.

[0313] In some embodiments it is preferred that the functional variant of CRE0042 (SEQ ID NO: 104) comprises TFBS for the same liver-specific TFs as CRE0042. The liver-specific TFBS present in CRE0042, listed in the order in which they are present, are: HNF-3 (SEQ ID NO: 106), C/EBP (SEQ ID NO: 107), HNF-4 (SEQ ID NO: 108) and C/EBP′ (SEQ ID NO: 109). The functional variant of CRE0042 thus preferably comprises all of these TFBS. Preferably, they are present in the same order that they are present in CRE0042, i.e. in the order HNF-3, C/EBP, HNF-4 and then C/EBP. When the cis-regulatory element is associated with a promoter and gene, this order is preferably considered in an upstream to downstream direction (i.e. in the direction from distal from the transcription start site (TSS) to proximal to the TSS). Spacer sequences may be provided between adjacent TFBS. In some embodiments the TFBS may suitably overlap, provided they remain functional, i.e. overlapping sequences are both able to bind their respective TFs.

[0314] In some embodiments the functional variant of CRE042 (SEQ ID NO: 104) comprises the following TFBS sequences: GTTCAAACATG (HNF-3) (SEQ ID NO: 106), CTAATACTCTG (C/EBP) (SEQ ID NO: 107), TGCAAGGGTCAT (HNF-4) (SEQ ID NO: 108), and TTACTCAACA (C/EBP) (SEQ ID NO: 109) and sequences complementary thereto, or functional variants of these TFBS sequences that maintain the ability to bind to their respective TF. These may be present in the same order as CRE0042, i.e. the order in which they are set out above. As discussed above, it is well-known in the art that there is sequence variability associated with TFBS, and that for a given TFBS there is typically a consensus sequence, from which some degree of deviation is typically present.

[0315] In some embodiments of the invention, the functional variant of CRE0042 comprises the sequence:

[0316] GTTCAAACATG-Na-CTAATACTCTG-Nb-TGCAAGGGTCAT-Nc-TTACTCAACA (SEQ ID NO: 105) or a sequence that is at least 70%, 80%, 90%, 95% or 99% identical thereto, wherein Na, Nb and Nc represent optional spacer sequences. When present, Na optionally has a length of from 1 to 10 nucleotides, preferably from 1 to 5 nucleotides, and more preferably 2 nucleotides. When present, Nb optionally has a length of from 1 to 10 nucleotides, preferably from 2 to 6 nucleotides, and more preferably 4 nucleotides. When present, Nc optionally has a length of from 8 to 23 nucleotides, preferably from 10 to 20 nucleotides, and more preferably 15 nucleotides.

[0317] In some embodiments of the invention the cis-regulatory enhancer element consists of CRE0042 (SEQ ID NO: 104) or a functional variant thereof.

[0318] It will be noted that the CRE or functional variant thereof can be provided on either strand of a double stranded polynucleotide and can be provided in either orientation. As such, complementary and reverse complementary sequences of SEQ ID NO: 104 or 105 or a functional variant thereof fall within the scope of the invention. Single stranded nucleic acids comprising the sequence according to SEQ ID NO: 104 or 105 or a functional variant thereof also fall within the scope of the invention.

In some embodiments, the CRE comprising or consisting of CRE0042 (SEQ ID NO: 104), or a functional variant thereof, has a length of 200 or fewer nucleotides, 150 or fewer nucleotides, 125 or fewer nucleotides, 100 or fewer nucleotides, or 80 or fewer nucleotides.

[0319] In some embodiments, the CRE comprising or consisting of CRE0059 (SEQ ID NO: 110) or a functional variant thereof, has a length of 200 or fewer nucleotides, 150 or fewer nucleotides, 125 or fewer nucleotides, or 100 or fewer nucleotides. Functional variants thereof may have a sequence that is at least 60%, 65%, 70%, 75%, 80%, 85%, 90%, 95%, 96%, 97%, 98%, or 99% identical thereto.

[0320] As discussed above, functional variants of CRE0059 (SEQ ID NO: 110) substantially retain the ability of CRE00059 to act as a liver-specific promoter element. For example, when a functional variant of CRE0059 is substituted into liver-specific promoter SP0412, the modified promoter retains at least 80% of its activity, more preferably at least 90% of its activity, more preferably at least 95% of its activity, and yet more preferably 100% of the activity of SP0412 (SEQ ID NO: 91). Suitably the functional variant of CRE0059 comprises a sequence which has at least 70%, 80%, 90%, 95% or 99% identity to SEQ ID NO: 110.

[0321] CRE0059 is a proximal promoter and comprises a TFBS for a liver-specific TF, namely HNF1, upstream of the TSS. The functional variant of CRE0059 thus preferably comprises a TFBS for HNF1 upstream of the TSS.

[0322] In some embodiments, a functional variant of CRE0059 comprises a sequence which is at least 70% identical to SEQ ID NO: 110 (preferably at least 80%, 90%, 95% or 99% identical to SEQ ID NO: 110), which contains a TFBS for HNF1 (SEQ ID NO: 111), and which contains a TSS sequence (referred to as pl@SERPINA1 or pl@AFP) which is at least 80%, 90%, 95% or completely identical to SEQ ID NO: 112 downstream of said TFBS for HNF1.

[0323] In some embodiments, a functional variant of CRE0059 comprises a sequence which has at least 70%, 80%, 90%, 95% or 99% identity to SEQ ID NO: 110, and which further comprises a TFBS comprising SEQ ID NO: 111 for HNF1 at or near position 24-36; and which comprises the TSS sequence which is at least 80%, 90%, 95% or completely identical to SEQ ID NO: 112 at or near position 73-93, positions being numbered with reference to SEQ ID NO: 110. At or near in the present context suitably means within 10, 5, 4, 3, 2, or 1 nucleotide of the recited position with reference to SEQ ID NO: 110. Suitable TFBS sequences are SEQ ID NOS 111 and SEQ ID NO: 112, but alternative TFBS sequences can be used.

[0324] In some embodiments, a promoter element comprising or consisting of CRE0059 (SEQ ID NO: 110) or a functional variant thereof has a length of 200 or fewer nucleotides, 150 or fewer nucleotides, 125 or fewer nucleotides, 110 or fewer nucleotides, or 95 or fewer nucleotides.

[0325] In some embodiments the liver-specific promoter useful in the methods and compositions as disclosed herein comprises or consists of SEQ ID NO: 91, or a functional variant thereof. In some embodiments, functional variants may have a sequence that is at least 60%, 65%, 70%, 75%, 80%, 85%, 90%, 95%, 96%, 97%, 98%, or 99% identical thereto. The promoter having a sequence according to SEQ ID NO: 91 is referred to as SP0412. The SP0412 promoter is particularly preferred in some embodiments. This promoter has been found to be powerful and is also very short, which is advantageous in some circumstances.

a. SP0265 (Also Known as SP131A1) and Variants Thereof

[0326] In some embodiments, the promoter is a synthetic liver-specific promoter comprising a combination of the CREs CRE0051 (SEQ ID NO: 97), CRE0058 (SEQ ID NO: 113), CRE0065 (SEQ ID NO: 117), and CRE0066 (SEQ ID NO: 122), or functional variants thereof. Typically, the CREs are operably linked to a promoter element. In some preferred embodiments, the liver-specific promoter comprises said CREs, or functional variants thereof, in the order CRE0051, CRE0058, CRE0065, CRE0066, and then the promoter element (in an upstream to downstream direction).

[0327] The promoter element can be any suitable proximal or minimal promoter. In some preferred embodiments, the promoter element is a minimal promoter. Where the promoter is a proximal promoter, it is generally preferred that the proximal promoter is liver-specific.

[0328] In some preferred embodiments, the promoter element is CRE0052 (also referred to as G6PC) (SEQ ID NO: 126). CRE0052 is a minimal promoter (also referred to as a core promoter).

[0329] In some embodiments, the liver-specific promoter comprises the following regulatory elements (or functional variants thereof): CRE0051, CRE0058, CRE0065, CRE0066 then CRE0052 (SEQ ID NO: 126).

The sequence of CRE0051 (SEQ ID NO: 97) and variants thereof are set out above.

[0330] In some embodiments, the CRE comprising or consisting of CRE0058 (SEQ ID NO: 113), or a functional variant thereof, has a length of 200 or fewer nucleotides, 150 or fewer nucleotides, 125 or fewer nucleotides, 100 or fewer nucleotides, or 80 or fewer nucleotides. Functional variants thereof may have a sequence that is at least 60%, 65%, 70%, 75%, 80%, 85%, 90%, 95%, 96%, 97%, 98%, or 99% identical thereto.

[0331] Functional variants of CRE0058 (SEQ ID NO: 113) are regulatory elements with sequences which vary from CRE0058, but which substantially retain their activity as liver-specific CREs. It will be appreciated by the skilled person that it is possible to vary the sequence of a CRE while retaining its ability to bind to the requisite TFs and enhance expression. A functional variant can comprise substitutions, deletions and/or insertions compared to a reference CRE, provided they do not render the CRE non-functional.

[0332] In some embodiments, a functional variant of CRE0058 (SEQ ID NO: 113) can be viewed as a CRE which, when substituted in place of CRE0058 in a promoter, substantially retains its activity. For example, a promoter which comprises a functional variant of CRE0058 substituted in place of CRE0058 preferably retains 80% of its activity, more preferably 90% of its activity, more preferably 95% of its activity, and yet more preferably 100% of its activity (compared to the reference promoter comprising CRE0058 (SEQ ID NO: 113)). For example, considering promoter SP0265 (SEQ ID NO: 94) as an example, CRE0058 in SP0265 can be replaced with a functional variant of CRE0058, and the promoter substantially retains its activity. Retention of activity can be assessed by comparing expression of a suitable reporter under the control of the reference promoter with an otherwise identical promoter comprising the substituted CRE under equivalent conditions.

[0333] In some embodiments it is preferred that the functional variant of CRE0058 (SEQ ID NO: 113) comprises transcription factor binding sites (TFBS) for the same liver-specific transcription factors (TF) as CRE0058. The liver-specific TFBS present in CRE0058, listed in the order in which they are present, are: HNF4 (SEQ ID NO: 115) and c/EBP (SEQ ID NO: 116). The functional variant of CRE0058 thus preferably comprises all of these TFBS. Preferably, they are present in the same order that they are present in CRE0058, i.e. in the order HNF4 then c/EBP. When the CRE is associated with a promoter and gene, this order is preferably considered in an upstream to downstream direction (i.e. in the direction from distal from the transcription start site (TSS) to proximal to the TSS). Spacer sequences may be provided between adjacent TFBS. In some embodiments the TFBS may suitably overlap, provided they remain functional, i.e. overlapping sequences are both able to bind their respective TFs.

[0334] In some embodiments, the functional variant of CRE0058 (SEQ ID NO: 113) comprises the following TFBS sequences: CGCCCTTTGGACC (HNF4) (SEQ ID NO: 115) and GACCTTTTGCAATCCTGG (c/EBP) (SEQ ID NO: 116), sequences complementary thereto, or functional variants of these TFBS sequences that maintain the ability to bind to their respective TF. These may be present in the same order as CRE0058, i.e. the order in which they are set out above. As discussed above, it is well-known in the art that there is sequence variability associated with TFBS, and that for a given TFBS there is typically a consensus sequence, from which some degree of deviation is typically present.

[0335] In some embodiments, the functional variant of CRE0058 comprises the sequence: GCGCCCTTTGGACCTTTTGCAATCCTGG (SEQ ID NO: 114), or a sequence that is at least 70%, 80%, 90%, 95% or 99% identical thereto.

In some embodiments, the CRE consists of SEQ ID NO: 113 or 114 or a functional variant thereof.

[0336] It will be noted that the CRE or functional variant thereof can be provided on either strand of a double stranded polynucleotide and can be provided in either orientation. As such, complementary and reverse complementary sequences of SEQ ID NO: 113 or 114 or a functional variant thereof fall within the scope of the invention. Single stranded nucleic acids comprising the sequence according to SEQ ID NO: 113 or 114, or a functional variant thereof, also fall within the scope of the invention.

[0337] In some embodiments, the CRE comprising or consisting of CRE0058, or a functional variant thereof, has a length of 120 or fewer nucleotides, 80 or fewer nucleotides, 60 or fewer nucleotides, or 40 or fewer nucleotides.

[0338] In some embodiments, the CRE comprising or consisting of CRE0065 (SEQ ID NO: 117), or a functional variant thereof, has a length of 200 or fewer nucleotides, 150 or fewer nucleotides, 125 or fewer nucleotides, 100 or fewer nucleotides, or 80 or fewer nucleotides. Functional variants thereof may have a sequence that is at least 60%, 65%, 70%, 75%, 80%, 85%, 90%, 95%, 96%, 97%, 98%, or 99% identical thereto.

[0339] Functional variants of CRE0065 (SEQ ID NO: 117) are regulatory elements with sequences which vary from CRE0065, but which substantially retain their activity as liver-specific CREs. It will be appreciated by the skilled person that it is possible to vary the sequence of a CRE while retaining its ability to bind to the requisite TFs and enhance expression. A functional variant can comprise substitutions, deletions and/or insertions compared to a reference CRE, provided they do not render the CRE non-functional.

[0340] In some embodiments, a functional variant of CRE0065 can be viewed as a CRE which, when substituted in place of CRE0065 in a promoter, substantially retains its activity. For example, a promoter which comprises a functional variant of CRE0065 substituted in place of CRE0065 preferably retains 80% of its activity, more preferably 90% of its activity, more preferably 95% of its activity, and yet more preferably 100% of its activity (compared to the reference promoter comprising CRE0065). For example, considering promoter SP0265 (SEQ ID NO: 94) as an example, CRE0065 in SP0265 can be replaced with a functional variant of CRE0065, and the promoter substantially retains its activity. Retention of activity can be assessed by comparing expression of a suitable reporter under the control of the reference promoter with an otherwise identical promoter comprising the substituted CRE under equivalent conditions.

[0341] In some embodiments it is preferred that the functional variant of CRE0065 comprises TFBS for the same liver-specific TFs as CRE0065. The liver-specific TFBS present in CRE0065, listed in the order in which they are present, are: RXR Alpha (SEQ ID NO: 119), HNF3 (SEQ ID NO: 120) and HNF3 (SEQ ID NO: 121). The functional variant of CRE0065 thus preferably comprises all of these TFBS. Preferably, they are present in the same order that they are present in CRE0065, i.e. in the order RXR Alpha, HNF3 then HNF3. When the cis-regulatory element is associated with a promoter and gene, this order is preferably considered in an upstream to downstream direction (i.e. in the direction from distal from the transcription start site (TSS) to proximal to the TSS). Spacer sequences may be provided between adjacent TFBS. In some embodiments the TFBS may suitably overlap, provided they remain functional, i.e. overlapping sequences are both able to bind their respective TFs.

[0342] In some embodiments, the functional variant of CRE0065 comprises the following TFBS sequences: ACTGAACCCTTGACCCCTGCCCT (RXR Alpha) (SEQ ID NO: 119), CTGTTTGCCC (HNF3) (SEQ ID NO: 120), and CTATTTGCCC (HNF3) (SEQ ID NO: 121), sequences complementary thereto, or functional variants of these TFBS sequences that maintain the ability to bind to their respective TF. These may be present in the same order as CRE0065, i.e. the order in which they are set out above. As discussed above, it is well-known in the art that there is sequence variability associated with TFBS, and that for a given TFBS there is typically a consensus sequence, from which some degree of deviation is typically present.

[0343] In some embodiments, the functional variant of CRE0065 comprises the sequence:

(SEQ ID NO: 118)
ACTGAACCCTTGACCCCT-Na-CTGTTTGCCC-Nb-TATTTGCCC

or a sequence that is at least 70%, 80%, 90%, 95% or 99% identical thereto, wherein Na and Nb represent optional spacer sequences. When present, Na optionally has a length of from 14 to 30 nucleotides, preferably from 18 to 26 nucleotides, and more preferably 22 nucleotides. When present, Nb optionally has a length of from 1 to 10 nucleotides, preferably from 2 to 6 nucleotides, and more preferably 4 nucleotides. In some embodiments, the CRE consists of SEQ ID NO: 117 or 118, or a functional variant thereof.

[0344] It will be noted that the CRE or functional variant thereof can be provided on either strand of a double stranded polynucleotide and can be provided in either orientation. As such, complementary and reverse complementary sequences of SEQ ID NO: 117 or 118 or a functional variant thereof fall within the scope of the invention. Single stranded nucleic acids comprising the sequence according to SEQ ID NO: 117 or 118 or a functional variant thereof also fall within the scope of the invention.

[0345] In some preferred embodiments, the CRE comprising or consisting of CRE0065, or a functional variant thereof, has a length of 200 or fewer nucleotides, 150 or fewer nucleotides, 125 or fewer nucleotides, 90 or fewer nucleotides, or 72 or fewer nucleotides.

[0346] In some embodiments, the CRE comprising or consisting of CRE0066 (SEQ ID NO: 122), or a functional variant thereof, has a length of 200 or fewer nucleotides, 150 or fewer nucleotides, 125 or fewer nucleotides, 100 or fewer nucleotides, or 80 or fewer nucleotides Functional variants thereof may have a sequence that is at least 60%, 65%, 70%, 75%, 80%, 85%, 90%, 95%, 96%, 97%, 98%, or 99% identical thereto.

[0347] Functional variants of CRE0066 (SEQ ID NO: 122) are regulatory elements with sequences which vary from CRE0066, but which substantially retain their activity as liver-specific CREs. It will be appreciated by the skilled person that it is possible to vary the sequence of a CRE while retaining its ability to bind to the requisite TFs and enhance expression. A functional variant can comprise substitutions, deletions and/or insertions compared to a reference CRE, provided they do not render the CRE non-functional.

[0348] In some embodiments, a functional variant of CRE0066 can be viewed as a CRE which, when substituted in place of CRE0066 in a promoter, substantially retains its activity. For example, a promoter which comprises a functional variant of CRE0066 substituted in place of CRE0066 preferably retains 80% of its activity, more preferably 90% of its activity, more preferably 95% of its activity, and yet more preferably 100% of its activity (compared to the reference promoter comprising CRE0066 (SEQ ID NO: 122). For example, considering promoter SP0265 (SEQ ID NO: 94) as an example, CRE0066 in SP0265 can be replaced with a functional variant of CRE0066, and the promoter substantially retains its activity. Retention of activity can be assessed by comparing expression of a suitable reporter under the control of the reference promoter with an otherwise identical promoter comprising the substituted CRE under equivalent conditions.

[0349] In some embodiments, it is preferred that the functional variant of CRE0066 comprises transcription factor binding sites (TFBS) for the same liver-specific transcription factors (TF) as CRE0066. The liver-specific TFBS present in CRE0066, listed in the order in which they are present, are: HNF4G (SEQ ID NO: 124) and FOS::JUN (SEQ ID NO: 125). The functional variant of CRE0066 thus preferably comprises all of these TFBS. Preferably, they are present in the same order that they are present in CRE0066, i.e. in the order HNF4G then FOS::JUN. When the cis-regulatory element is associated with a promoter and gene, this order is preferably considered in an upstream to downstream direction (i.e. in the direction from distal from the transcription start site (TSS) to proximal to the TSS). Spacer sequences may be provided between adjacent TFBS. In some embodiments the TFBS may suitably overlap, provided they remain functional, i.e. overlapping sequences are both able to bind their respective TFs.

[0350] In some embodiments, the functional variant of CRE0066 (SEQ ID NO: 122) comprises the following TFBS sequences: GCAGGGCAAAGTGCA (HNF4G) (SEQ ID NO: 124) and GATGACTCAG (FOS::JUN) (SEQ ID NO: 125), sequences complementary thereto, or functional variants of these TFBS sequences that maintain the ability to bind to their respective TF. These may be present in the same order as CRE0066, i.e. the order in which they are set out above. As discussed above, it is well-known in the art that there is sequence variability associated with TFBS, and that for a given TFBS there is typically a consensus sequence, from which some degree of deviation is typically present.

[0351] In some embodiments, the functional variant of CRE0066 (SEQ ID NO: 122) comprises the sequence: GCAGGGCAAAGTGCA-Na-GATGACTCAG (SEQ ID NO: 123) or a sequence that is at least 70%, 80%, 90%, 95% or 99% identical thereto, wherein Na represents an optional spacer sequence. When present, Na optionally has a length of from 10 to 28 nucleotides, preferably from 14 to 24 nucleotides, and more preferably 19 nucleotides.

In some embodiments, the CRE consists of CRE0066 or a functional variant thereof.

[0352] It will be noted that the CRE or functional variant thereof can be provided on either strand of a double stranded polynucleotide and can be provided in either orientation. As such, complementary and reverse complementary sequences of SEQ ID NO: 122 or 123 or a functional variant thereof fall within the scope of the invention. Single stranded nucleic acids comprising the sequence according to SEQ ID NO: 122 or 123, or a functional variant thereof, also fall within the scope of the invention.

[0353] In some preferred embodiments, the CRE comprising or consisting of CRE0066 or a functional variant thereof has a length of 200 or fewer nucleotides, 150 or fewer nucleotides, 125 or fewer nucleotides, 100 or fewer nucleotides, or 87 or fewer nucleotides.

[0354] In some embodiments, the promoter comprises the promoter element CRE0052 (also referred to as G6PC) (SEQ ID NO: 126) or a functional variant or functional fragment thereof. Functional variants thereof may have a sequence that is at least 60%, 65%, 70%, 75%, 80%, 85%, 90%, 95%, 96%, 97%, 98%, or 99% identical thereto.

[0355] Functional variants of CRE0052 (SEQ ID NO: 126) substantially retain the ability of CRE0052 to act as a liver-specific promoter element. For example, when a functional variant of CRE0052 is substituted into liver-specific promoter SP0265, the modified promoter retains at least 80% of its activity, more preferably at least 90% of its activity, more preferably at least 95% of its activity, and yet more preferably 100% of the activity of SP0265.

[0356] In one embodiment the liver-specific promoter comprises SEQ ID NO: 94, or a functional variant thereof. In some embodiments, functional variants may have a sequence that is at least 60%, 65%, 70%, 75%, 80%, 85%, 90%, 95%, 96%, 97%, 98%, or 99% identical to SEQ ID NO: 94. The promoter having a sequence according to SEQ ID NO: 94 is referred to as SP0265 (also known as SP131A1 or LVR 131_A1). A promoter comprising or consisting of SEQ ID NO: 94 is particularly preferred in some embodiments.

[0357] In some embodiments, the liver-specific promoter is SEQ ID NO: 94 and comprises the following components: CRE0051 (SEQ ID NO: 97); CRE0058 (SEQ ID NO: 113); CRE0065 (SEQ ID NO: 117), CRE0066 (SEQ ID NO: 122), CRE0052 (SEQ ID NO: 126); or functional variants of SEQ ID NO: 97, 113, 117, 122 or 126 which may have a sequence that is at least 60%, 65%, 70%, 75%, 80%, 85%, 90%, 95%, 96%, 97%, 98%, or 99% identical thereto.

b. SP0239 and Variants Thereof

[0358] In some embodiments, the promoter is a synthetic liver-specific promoter comprising the following CREs: CRE0018 (SEQ ID NO: 151), CRE0051 (SEQ ID NO: 97), CRE0058 (SEQ ID NO: 113), CRE0065 (SEQ ID NO: 117) and CRE0066 (SEQ ID NO: 122), or functional variants thereof. Typically, the CREs are operably linked to a promoter element. In some preferred embodiments, the liver-specific promoter comprises said CREs, or functional variants thereof, in the order CRE0018, CRE0051, CRE0058, CRE0065, CRE0066, and then the promoter element (in an upstream to downstream direction).

[0359] The promoter element can be any suitable proximal or minimal promoter. In some preferred embodiments the promoter element is CRE0052 (also referred to as G6PC). CRE0052 is a minimal promoter (also referred to as a core promoter).

[0360] In some embodiments the liver-specific promoter comprises the following elements (or functional variants thereof): CRE0018, CRE0051, CRE0058, CRE0065, CRE0066 and then CRE0052.

[0361] The sequences of CRE0051, CRE0058, CRE0065, and CRE0066 and the promoter element CRE0052, and functional variants thereof, are set out above.

[0362] CRE0018 has the sequence of SEQ ID NO: 151 or a functional variant or functional fragment thereof. Functional variants thereof may have a sequence that is at least 60%, 65%, 70%, 75%, 80%, 85%, 90%, 95%, 96%, 97%, 98%, or 99% identical thereto.

[0363] Functional variants of CRE0018 (SEQ ID NO: 151) are regulatory elements with sequences which vary from CRE0018, but which substantially retain their activity as liver-specific CREs. It will be appreciated by the skilled person that it is possible to vary the sequence of a CRE while retaining its ability to bind to the requisite TFs and enhance expression. A functional variant can comprise substitutions, deletions and/or insertions compared to a reference CRE, provided they do not render the CRE substantially non-functional.

[0364] In some embodiments, a functional variant of CRE0018 can be viewed as a CRE which, when substituted in place of CRE0018 in a promoter, substantially retains its activity. For example, a promoter which comprises a functional variant of CRE0018 substituted in place of CRE0018 preferably retains 80% of its activity, more preferably 90% of its activity, more preferably 95% of its activity, and yet more preferably 100% of its activity (compared to the reference promoter comprising CRE0018). For example, considering promoter SP0239 as an example, CRE0018 in SP0239 in can be replaced with a functional variant of CRE0018, and the promoter substantially retains its activity. Retention of activity can be assessed by comparing expression of a suitable reporter under the control of the reference promoter with an otherwise identical promoter comprising the substituted CRE under equivalent conditions.

[0365] In some embodiments, the functional variant of CRE0018 comprises TFBS for the same liver-specific TFs as CRE0018. The liver-specific TFBS present in CRE0018, listed in the order in which they are present, are: IRF (SEQ ID NO: 129), NF1 (SEQ ID NO: 130), HNF3 (SEQ ID NO: 131), HBLF (SEQ ID NO: 132), RXRa (SEQ ID NO: 133), EF-C(SEQ ID NO: 134), NF1 (SEQ ID NO: 135), and c/EBP (SEQ ID NO: 136). The functional variant of CRE0018 thus preferably comprises all of these TFBS. Preferably, they are present in the same order that they are present in CRE0018, i.e. in the order IRF, NF1, HNF3, HBLF, RXRa, EF-C, NF1, and then c/EBP. When the CRE is associated with a promoter and gene, this order is preferably considered in an upstream to downstream direction (i.e. in the direction from distal from the transcription start site (TSS) to proximal to the TSS). Spacer sequences may be provided between adjacent TFBS. In some embodiments the TFBS may suitably overlap, provided they remain functional, i.e. overlapping sequences are both able to bind their respective TFs.

[0366] In some embodiments the functional variant of CRE0018 comprises the following TFBS sequences: CTTTCACTTTC (IRF) (SEQ ID NO: 129), TCGCCAA (NF1) (SEQ ID NO: 130), TGTGTAAACA (HNF3) (SEQ ID NO: 131), TGTAAACAATA (HBLF) (SEQ ID NO: 132), CTGAACCTTTACCC (RXRa) (SEQ ID NO: 133), GTTGCCCGGCAAC (EF-C) (SEQ ID NO: 134), CAGGTCTGTGCCAAG (NF1) (SEQ ID NO: 135), TGCCAAGTGTTTG (c/EBP) (SEQ ID NO: 136), sequences complementary thereto, or functional variants of these TFBS sequences that maintain the ability to bind to their respective TF of SEQ ID NO: 129-136. These may be present in the same order as CRE0018, i.e. the order in which they are set out above. As discussed above, it is well-known in the art that there is sequence variability associated with TFBS, and that for a given TFBS there is typically a consensus sequence, from which some degree of deviation is typically present.

[0367] In some embodiments of the invention, the functional variant of CRE0018 comprises the sequence: CTTTCACTTTCTCGCCAA-Na-TGTGTAAACAATA-Nb-CTGAACCTTTACCC-Nc-GTTGCCCGGCAAC-Nd-CAGGTCTGTGCCAAGTGTTTG (SEQ ID NO: 128), or a sequence that is at least 70%, 80%, 90%, 95% or 99% identical thereto, wherein Na, Nb, Nc, and Nd represent optional spacer sequences. When present, Na optionally has a length of from 10 to 20 nucleotides, preferably from 13 to 17 nucleotides, and more preferably 15 nucleotides. When present, Nb optionally has a length of from 1 to 10 nucleotides, preferably from 1 to 5 nucleotides, more preferably 1 nucleotide. When present, Nc optionally has a length of from 1 to 10 nucleotides, preferably 1 to 5 nucleotides, and more preferably 1 nucleotide. When present, Nd suitably has a length of from 1 to 10 nucleotides, preferably from 2 to 8 nucleotides in length, and more preferably 3 nucleotides in length.

[0368] In some embodiments of the invention the CRE consists of SEQ ID NO: 127 or 128 or a functional variant thereof.

[0369] It will be noted that the CRE or functional variant thereof can be provided on either strand of a double stranded polynucleotide and can be provided in either orientation. As such, complementary and reverse complementary sequences of SEQ ID NO: 128 or 129 or a functional variant thereof fall within the scope of the invention. Single stranded nucleic acids comprising the sequence according to SEQ ID NOS: 128 or 129 or a functional variant thereof also fall within the scope of the invention.

[0370] In some embodiments, the CRE comprising or consisting of CRE0018 (SEQ ID NO: 151), or a functional variant thereof, has a length of 200 or fewer nucleotides, 150 or fewer nucleotides, 125 or fewer nucleotides, or 103 or fewer nucleotides.

[0371] In one embodiment the liver-specific promoter comprises or consist of: SEQ ID NO: 93, or a functional variant thereof. The promoter having a sequence according to SEQ ID NO: 93 is referred to as SP0239. Functional variants of SP0239 can have a sequence that is at least 60%, 65%, 70%, 75%, 80%, 85%, 90%, 95%, 96%, 97%, 98%, or 99% identical thereto.

[0372] Accordingly, in some embodiments, the liver-specific promoter is SP0239 (SEQ ID NO: 93) and comprises the following components: CRE0018 (SEQ ID NO: 151), CRE0051 (SEQ ID NO: 97), CRE0058 (SEQ ID NO: 113), CRE0065 (SEQ ID NO: 117) and CRE0066 (SEQ ID NO: 122, and CRE0052 (SEQ ID NO: 126); or functional variants may have a sequence that is at least 60%, 65%, 70%, 75%, 80%, 85%, 90%, 95%, 96%, 97%, 98%, or 99% identical thereto.

c. SP0240 and Variants Thereof

[0373] In some embodiments, the promoter is a synthetic liver-specific promoter comprising CRE0018 operably linked to a promoter element. In some preferred embodiments, the liver-specific promoter comprises CRE0018, or immediately upstream of the promoter element.

[0374] The promoter element can be any suitable proximal or minimal promoter. In some preferred embodiments the promoter element is CRE0006 (SEQ ID NO: 137). CRE0006 is a liver-specific proximal promoter.

[0375] In some embodiments the liver-specific promoter comprises the following elements (or functional variants thereof): CRE0018 and then CRE0006.

[0376] The sequence of CRE0018 and variants thereof are set out above.

[0377] CRE0006 is a proximal promoter and comprises TFBS for liver-specific TFs upstream of the TSS. The liver-specific TFBS present in CRE0006, listed in order, are HNF4 (SEQ ID NO: 138), RXRa (SEQ ID NO: 139), HNF4 (SEQ ID NO: 140), c/EBP (SEQ ID NO: 141), and HNF3 (SEQ ID NO: 142), and optionally pl@VTN (SEQ ID NO: 143). The functional variant of CRE0006 thus preferably comprises these TFBS. Preferably, they are present in the same order that they are present in CRE0006, i.e. in the order HNF4, c/EBP, HNF3, and HNF3. In some embodiments the TFBS overlap, provided they remain functional, i.e. overlapping sequences are both able to bind their respective TFs.

[0378] pl@VTN (SEQ ID NO: 143), represents the transcription start site (TSS) in CRE0006, as determined by Cap Analysis of Gene Expression (CAGE).

[0379] In some embodiments, a functional variant of CRE0006 comprises a sequence which is at least 70% identical to SEQ ID NO: 137 (preferably at least 80%, 90%, 95% or 99% identical to SEQ ID NO: 25), which contains TFBS for HNF4, RXRa, HNF4, c/EBP, and HNF3, and preferably which contains a TSS sequence which is at least 80%, 90%, 95% or completely identical to TFBS for HNF4, RXRa, HNF4, c/EBP, and HNF3 downstream of said TFBS.

[0380] In some embodiments, a functional variant of CRE0006 comprises a sequence which has at least 70%, 80%, 90%, 95% or 99% identity to SEQ ID NO: 137, and which further comprises the following TFBS: HNF4 (SEQ ID NO: 138) at or near position 25-37; RXRa (SEQ ID NO: 139) at or near position 73-83; HNF4 (SEQ ID NO: 140) at or near position 74-86; c/EBP (SEQ ID NO: 141) at or near position 123-136; and HNF3 (SEQ ID NO: 142) at or near position 129-137; and which comprises a TSS sequence which is at least 80%, 90%, 95% or completely identical to SEQ ID NO: 143 at or near position 166-196, positions being numbered with reference to SEQ ID NO: 137. At or near in the present context suitably means within 10, 5, 4, 3, 2, or 1 nucleotide of the recited position with reference to SEQ ID NO: 137. Suitable TFBS sequences are SEQ ID Nos: 138-142, but alternative TFBS sequences can be used.

[0381] In one embodiment the liver-specific promoter comprises or consist of SEQ ID NO: 95, or a functional variant thereof. The promoter having a sequence according to SEQ ID NO: 95 is referred to as SP0240. Functional variants of SP0240 can have a sequence that is at least 60%, 65%, 70%, 75%, 80%, 85%, 90%, 95%, 96%, 97%, 98%, or 99% identical thereto.

d. SP0246 and Variants Thereof

[0382] In some embodiments, the promoter is a synthetic liver-specific promoter comprising the following CREs: CRE0051, CRE0058, and CRE0065, or functional variants thereof. Typically, the CREs are operably linked to a promoter element. In some preferred embodiments, the liver-specific promoter comprises said CREs, or functional variants thereof, in the order CRE0051, CRE0058, and CRE0065, and then the promoter element (in an upstream to downstream direction).

[0383] The promoter element can be any suitable proximal or minimal promoter. In some preferred embodiments the promoter element is CRE0052 (also referred to as G6PC). CRE0052 is a minimal promoter (also referred to as a core promoter).

[0384] In some embodiments the liver-specific promoter comprises the following elements (or functional variants thereof): CRE0051, CRE0058, CRE0065, and then CRE0052. The sequences of CRE0051, CRE0058, CRE0065 and the promoter element CRE0052, and functional variants thereof, are set out above.

[0385] In one embodiment the liver-specific promoter comprises or consist of SEQ ID NO: 96, or a functional variant thereof. The promoter having a sequence according to SEQ ID NO: 96 is referred to as SP0246. Functional variants of SP0246 can have a sequence that is at least 60%, 65%, 70%, 75%, 80%, 85%, 90%, 95%, 96%, 97%, 98%, or 99% identical to SEQ ID NO: 96.

e. SP0131 and Variants Thereof

[0386] In some embodiments, the promoter is a synthetic liver-specific promoter comprising the following CREs: CRE0058, CRE0065 and CRE0066, or functional variants thereof. Typically, the CREs are operably linked to a promoter element. In some preferred embodiments, the liver-specific promoter comprises said CREs, or functional variants thereof, in the order CRE0058, CRE0065, CRE0066 and then the promoter element (in an upstream to downstream direction).

[0387] The promoter element can be any suitable proximal or minimal promoter. In some preferred embodiments the promoter element is CRE0052 (also referred to as G6PC). CRE0052 is a minimal promoter (also referred to as a core promoter).

[0388] The sequences of CRE0058, CRE0065, and CRE0066 and the promoter element CRE0052, and functional variants thereof, are set out above.

[0389] SEQ ID NO: 141, or a functional variant thereof. The promoter having a sequence according to SEQ ID NO: 141 is referred to as SP0131. Functional variants of SP0131 can have a sequence that is at least 60%, 65%, 70%, 75%, 80%, 85%, 90%, 95%, 96%, 97%, 98%, or 99% identical thereto.

f. Composite Promoters:

[0390] In some embodiments, the liver-specific promoters as set out above are operably linked to one or more additional regulatory sequences. An additional regulatory sequence can, for example, enhance expression compared to the liver-specific promoter which is not operably linked the additional regulatory sequence. Generally, it is preferred that the additional regulatory sequence does not substantively reduce the specificity of the liver-specific promoter.

[0391] For example, the liver-specific promoter can be operably linked to a sequence encoding a UTR (e.g. a 5′ and/or 3′ UTR), an intron, or such.

[0392] In some embodiments, the liver-specific promoter is operably linked to sequence encoding a UTR, e.g. a 5′ UTR. A 5′ UTR can contain various elements that can regulate gene expression. The 5′ UTR in a natural gene begins at the transcription start site and ends one nucleotide before the start codon of the coding region. It should be noted that 5′ UTRs as referred to herein may be an entire naturally occurring 5′ UTR or it may be a portion of a naturally occurring 5′ UTR. The 5′UTR can also be partially or entirely synthetic. In eukaryotes, 5′ UTRs have a median length of approximately 150 nt, but in some cases they can be considerably longer. Regulatory sequences that can be found in 5′ UTRs include, but are not limited to:
[0393] Binding sites for proteins, that may affect the mRNA's stability or translation; Riboswitches;
[0394] Sequences that promote or inhibit translation initiation; and
[0395] Introns within 5′ UTRs have been linked to regulation of gene expression and mRNA export.

[0396] In some embodiments, a liver-specific promoter as set out above is operably linked to a sequence encoding a 5′ UTR derived from the CMV major immediate gene (CMV-IE gene). For example, the 5′ UTR from the CMV-IE gene suitably comprises the CMV-IE gene exon 1 and the CMV-IE gene exon 1, or portions thereof. In some cases, the promoter element may be modified in view of the linkage to the 5′UTR, for example sequences downstream of the transcription start site (TSS) in the promoter element can be removed (e.g. replaced with the 5′ UTR).

[0397] The CMV-IE 5′UTR is described in Simari, et al., Molecular Medicine 4: 700-706, 1998 “Requirements for Enhanced Transgene Expression by Untranslated Sequences from the Human Cytomegalovirus Immediate-Early Gene”, which is incorporated herein by reference. Variants of the CMV-IE 5′ UTR sequences discussed in Simari, et al. are also set out in WO2002/031137, incorporated by reference, and the regulatory sequences disclosed therein can also be used. Other UTRs that can be used in combination with a promoter are known in the art, e.g. in Leppek, K., Das, R. & Barna, M. “Functional 5′ UTR mRNA structures in eukaryotic translation regulation and how to find them”. Nat Rev Mol Cell Biol 19, 158-174 (2018), incorporated by reference.

[0398] In some embodiments the sequence encoding the 5′ UTR comprises SEQ ID NO: 145, or a functional variant thereof. In some embodiments, functional variants may have a sequence that is at least 60%, 65%, 70%, 75%, 80%, 85%, 90%, 95%, 96%, 97%, 98%, or 99% identical thereto. SEQ ID NO: 145 encodes a CMV-IE 5′ UTR.

[0399] In some embodiments the 5′ UTR comprises a nucleic acid motif that functions as the protein translation initiation site, e.g. sequences that define a Kozak sequence in the mRNA produced. For example, in some embodiments, the sequence encoding the 5′ UTR comprises the sequence motif GCCACC (SEQ ID NO: 153) at or near its 3′ end. Other Kozak sequences or other protein translation initiation sites can be used, as is known in the art (e.g. Marilyn Kozak, “Point Mutations Define a Sequence Flanking the AUG Initiator Codon That Modulates Translation by Eukaryotic Ribosomes” Cell, Vol. 44, 283-292, Jan. 31, 1986; Marilyn Kozak “At Least Six Nucleotides Preceding the AUG Initiator Codon Enhance Translation in Mammalian Cells” J. Mol. Rid. (1987) 196, 947-950; Marilyn Kozak “An analysis of 5-noncoding sequences from 699 vertebrate messenger RNAs” Nucleic Acids Research. Vol. 15 (20) 1987, all of which are incorporated herein by reference). The protein translation initiation site (e.g. Kozak sequence) is preferably positioned immediately adjacent to the start codon.

[0400] In some embodiments the sequence encoding the 5′ UTR comprises SEQ ID NO: 438, or a functional variant thereof. In some embodiments, functional variants may have a sequence that is at least 60%, 65%, 70%, 75%, 80%, 85%, 90%, 95%, 96%, 97%, 98%, or 99% identical thereto. This 5′ UTR comprises six nucleotides of SEQ ID NO: 153 which define a Kozak sequence at the 3′ end of the CMV-IE 5′ UTR.

[0401] In some embodiments, the SP0412 promoter, or variants thereof, as discussed above is linked to a sequence encoding a 5′ UTR to provide a composite promoter/5′ UTR regulatory construct. Herein, such composite promoter/5′ UTR constructs may be referred to simply as “composite promoters”, or in some cases simply “promoters” for brevity.

[0402] In some embodiments, the composite promoter comprises or consists of SEQ ID NO: 92, or a functional variant thereof. In some embodiments, functional variants may have a sequence that is at least 60%, 65%, 70%, 75%, 80%, 85%, 90%, 95%, 96%, 97%, 98%, or 99% identical to SEQ ID NO: 92.

[0403] This composite promoter comprises SP0412 operably linked to a sequence encoding the 5′ UTR from the CMV-IE gene (SEQ ID NO: 145) and the GCCACC (SEQ ID NO: 153) Kozak sequence discussed above. This (composite) promoter is referred to as SP0422 (SEQ ID NO: 92). SP0422 is a preferred liver specific promoter in some embodiments. As discussed above, the 5′ UTR suitably comprises a nucleic acid motif that functions as the protein translation initiation site, e.g. sequences that define a Kozak sequence. In the sequence above, the 5′ UTR comprises the sequence motif GCCACC (SEQ ID NO: 153) at its 3′ end, but this sequence motif can be omitted or alternative sequences can be used.

[0404] In some embodiments, the SP0265 promoter, or variants thereof, as discussed above is linked to a sequence encoding a 5′ UTR to provide a composite promoter (SP0236-5UTR).

[0405] In some embodiments, the composite promoter comprises or consists of SEQ ID NO: 146, or a functional variant thereof. In some embodiments, functional variants may have a sequence that is at least 60%, 65%, 70%, 75%, 80%, 85%, 90%, 95%, 96%, 97%, 98%, or 99% identical to SEQ ID NO: 146.

[0406] This composite promoter comprises SP0265 (SEQ ID NO: 94) operably linked to the 5′ UTR from the CMV-IE gene (SEQ ID NO: 145) and the GCCACC (SEQ ID NO: 153) Kozak sequence. This (composite) promoter is referred to as SP0420. In this promoter, a short sequence downstream of the TSS in the CRE0052 promoter element have been replaced with sequences from the 5′ UTR from the CMV-IE. Thus, this promoter actually comprises a minor variant of SP0265 with a modification to CRE0052 whereby some sequence has been removed. SP0420 is preferred in some embodiments. As discussed above, the 5′ UTR suitably comprises a nucleic acid motif that functions as the protein translation initiation site, e.g. sequences that define a Kozak sequence. In the sequence above, the 5′ UTR comprises the sequence motif GCCACC (SEQ ID NO: 153) at its 3′ end, but this sequence motif can be omitted or alternative sequences can be used.

[0407] In some embodiments, the SP0239 promoter, or variants thereof, as discussed above is linked to a sequence encoding a 5′ UTR to provide a composite promoter (SP0239-UTR).

[0408] In some embodiments, the composite promoter comprises or consists of SEQ ID NO: 147, or a functional variant thereof. In some embodiments, functional variants may have a sequence that is at least 60%, 65%, 70%, 75%, 80%, 85%, 90%, 95%, 96%, 97%, 98%, or 99% identical to SEQ ID NO: 147.

[0409] This composite promoter/5′ UTR construct comprises SP0239 operably linked to the 5′ UTR from the CMV-IE gene and the GCCACC (SEQ ID NO: 153) Kozak sequence. This (composite) promoter is referred to as SP0421. Again, in this promoter, a short sequence downstream of the TSS in the CRE0052 promoter element have been replaced with sequences from the 5′ UTR from the CMV-IE. Thus, this promoter actually comprises a minor variant of SP0239 with a modification to CRE0052 whereby some sequence has been removed. SP0421 is preferred in some embodiments. As discussed above, the 5′ UTR suitably comprises a nucleic acid motif that functions as the protein translation initiation site, e.g. sequences that define a Kozak sequence. In the sequence above, the 5′ UTR comprises the sequence motif GCCACC (SEQ ID NO: 153) at its 3′ end, but this sequence motif can be omitted or alternative sequences can be used.

[0410] In some embodiments, the SP0240 promoter, or variants thereof, as discussed above is linked to a sequence encoding a 5′ UTR to provide a composite promoter.

[0411] In some embodiments, the composite promoter comprises or consists of SEQ ID NO: 148, or a functional variant thereof. In some embodiments, functional variants may have a sequence that is at least 60%, 65%, 70%, 75%, 80%, 85%, 90%, 95%, 96%, 97%, 98%, or 99% identical thereto.

[0412] This composite promoter/5′ UTR construct comprises SP0240 operably linked to the 5′ UTR from the CMV-IE gene and the GCCACC (SEQ ID NO: 153) Kozak sequence. This (composite) promoter is referred to as SP0240-UTR. Again, in this promoter, a short sequence downstream of the TSS in the CRE0006 promoter element have been replaced with sequences from the 5′ UTR from the CMV-IE. Thus, this promoter actually comprises a minor variant of SP0240 with a modification to CRE0006 whereby some sequence has been removed. SP0240-UTR is preferred in some embodiments. As discussed above, the 5′ UTR suitably comprises a nucleic acid motif that functions as the protein translation initiation site, e.g. sequences that define a Kozak sequence. In the sequence above, the 5′ UTR comprises the sequence motif GCCACC (SEQ ID NO: 153) at its 3′ end, but this sequence motif can be omitted or alternative sequences can be used.

[0413] In some embodiments, the SP0246 promoter, or variants thereof, as discussed above is linked to a sequence encoding a 5′ UTR to provide a composite promoter.

[0414] In some embodiments, the composite promoter comprises or consists of SEQ ID NO: 149 (SP0246-UTR), or a functional variant thereof. In some embodiments, functional variants may have a sequence that is at least 60%, 65%, 70%, 75%, 80%, 85%, 90%, 95%, 96%, 97%, 98%, or 99% identical thereto.

[0415] This composite promoter/5′ UTR construct comprises SP0246 operably linked to the 5′ UTR from the CMV-IE gene and the GCCACC (SEQ ID NO: 153) Kozak sequence. This (composite) promoter is referred to as SP0246-UTR. Again, in this promoter, a short sequence downstream of the TSS in the CRE0052 promoter element have been replaced with sequences from the 5′ UTR from the CMV-IE. Thus, this promoter actually comprises a minor variant of SP0246 with a modification to CRE0052 whereby some sequence has been removed. SP0246-UTR is preferred in some embodiments. As discussed above, the 5′ UTR suitably comprises a nucleic acid motif that functions as the protein translation initiation site, e.g. sequences that define a Kozak sequence. In the sequence above, the 5′ UTR comprises the sequence motif GCCACC (SEQ ID NO: 153) at its 3′ end, but this sequence motif can be omitted or alternative sequences can be used.

[0416] In some embodiments, the SP0131_A1 promoter, or variants thereof, as discussed above is linked to a sequence encoding a 5′ UTR to provide a composite promoter.

[0417] In some embodiments, the composite promoter comprises or consists of SEQ ID NO: 150 (SP0131 A1-UTR), or a functional variant thereof. In some embodiments, functional variants may have a sequence that is at least 60%, 65%, 70%, 75%, 80%, 85%, 90%, 95%, 96%, 97%, 98%, or 99% identical thereto.

[0418] This composite promoter/5′ UTR construct comprises SP0131 operably linked to the 5′ UTR from the CMV-IE gene and the GCCACC (SEQ ID NO: 153) Kozak sequence. This (composite) promoter is referred to as SP0131-UTR. Again, in this promoter, a short sequence downstream of the TSS in the CRE0052 promoter element have been replaced with sequences from the 5′ UTR from the CMV-IE. Thus, this promoter actually comprises a minor variant of SP0131 with a modification to CRE0052 whereby some sequence has been removed. SP0131-UTR is preferred in some embodiments. As discussed above, the 5′ UTR suitably comprises a nucleic acid motif that functions as the protein translation initiation site, e.g. sequences that define a Kozak sequence. In the sequence above, the 5′ UTR comprises the sequence motif GCCACC (SEQ ID NO: 153) at its 3′ end, but this sequence motif can be omitted or alternative sequences can be used.

[0419] In some embodiments, the liver-specific promoter is SP0412 (SEQ ID NO: 91) and comprises the following components: CRE0051 (SEQ ID NO: 97), CRE0067 (SEQ ID NO: 152), CRE0059 (SEQ ID NO: 110) and a Kozak sequence (SEQ ID NO: 153); or functional variants may have a sequence that is at least 60%, 65%, 70%, 75%, 80%, 85%, 90%, 95%, 96%, 97%, 98%, or 99% identical thereto.

[0420] In some embodiments, the liver-specific promoter is SP0422 (SEQ ID NO: 9) and comprises the following components: CRE0051 (SEQ ID NO: 97), CRE0067 (SEQ ID NO: 152), CRE0059 (SEQ ID NO: 110), CMV-IE 5′UTR (SEQ ID NO: 153) and a Kozak sequence (SEQ ID NO: 153, or functional variants may have a sequence that is at least 60%, 65%, 70%, 75%, 80%, 85%, 90%, 95%, 96%, 97%, 98%, or 99% identical thereto.

(iii) Functional Variants of the Synthetic Liver-Specific Promoters

[0421] In some embodiments, a functional variant of a liver-specific promoter can be viewed as a promoter element which, when substituted in place of a reference promoter element in a promoter, substantially retains its activity. For example, a functional variant of liver-specific promoter which comprises a functional variant of a given promoter in Table 4 herein, or any promoter listed from SEQ ID NOS: 86 (CRM 0412), SEQ ID NO: 91 (SP0412) or SEQ ID NO: 92 (SP0422), SEQ ID NOS: 93 (SP0239), SEQ ID NO: 94 (SP0265, also referred to SP131_A1), SEQ ID NO: 95 (SP0240) or SEQ ID NO: 96 (SP0246), or SEQ ID NO: 146 (SP0265-UTR), SEQ ID NO: 147 (SP0239-UTR), SEQ ID NO: 148 (SP0240-UTR), SEQ ID NO: 149 (SP0246-UTR) or SEQ ID NO: 150 (SP0131-A1-UTR), or a functional fragment or variant thereof, or any LSP selected from SEQ ID NO: 270-341 or 342-430, or a functional fragment or variant thereof where a functional variant or functional fragments preferably retains at least 35%, or at least 40%, or at least 45%, or at least 50%, or at least 55%, or at least 60%, or at least 70% or at least 80% of its activity, more preferably at least 90% of its activity, more preferably at least 95% of the activity of the unchanged promoter, and yet more preferably 100% of the activity (as compared to the unchanged promoter sequence comprising the unmodified promoter element). Suitable assays for assessing liver-specific promoter activity are disclosed herein, e.g. in Examples 12 and 13.

[0422] In some embodiments, a functional variant or a functional fragment of a liver-specific promoter disclosed in Table 4 herein, or any promoter listed from SEQ ID NOS: 86 (CRM 0412), SEQ ID NO: 91 (SP0412) or SEQ ID NO: 92 (SP0422), SEQ ID NOS: 93 (SP0239), SEQ ID NO: 94 (SP0265, also referred to SP131 A1), SEQ ID NO: 95 (SP0240) or SEQ ID NO: 96 (SP0246), or SEQ ID NO: 146 (SP0265-UTR), SEQ ID NO: 147 (SP0239-UTR), SEQ ID NO: 148 (SP0240-UTR), SEQ ID NO: 149 (SP0246-UTR) or SEQ ID NO: 150 (SP0131-A1-UTR), or any LSP selected from SEQ ID NO: 270-341 or 342-430, has at least about 75% sequence identity to, or at least about 80% sequence identity to, at least about 90% sequence identity to, at least about 95% sequence identity to, at least about 98% sequence identity to the original unmodified sequence, and also at least 35% of the promoter activity, or at least about 45% of the promoter activity, or at least about 50% of the promoter activity, or at least about 60% of the promoter activity, or at least about 75% of the promoter activity, or at least about 80% of the promoter activity, or at least about 85% of the promoter activity, or at least about 90% of the promoter activity, or at least about 95% of the promoter activity of the corresponding unmodified promoter sequence.

[0423] For example, a functional variant or a functional fragment of SEQ ID NO: 258 (SP0412) or SEQ ID NO: 92 (SP0422) has at least about 75% sequence identity to SEQ ID NO: 91 (SP0412) or SEQ ID NO: 92 (SP0422), or at least about 80% sequence identity to SEQ ID NO: 91 (SP0412) or SEQ ID NO: 92 (SP0422), at least about 90% sequence identity to SEQ ID NO: 91 (SP0412) or SEQ ID NO: 92 (SP0422), at least about 95% sequence identity to SEQ ID NO: 91 (SP0412) or SEQ ID NO: 92 (SP0422), at least about 98% sequence identity to SEQ ID NO: SEQ ID NO: 91 (SP0412) or SEQ ID NO: 92 (SP0422), or the original unmodified sequence, and also at least 35% of the promoter activity, or at least about 45% of the promoter activity, or at least about 50% of the promoter activity, or at least about 60% of the promoter activity, or at least about 75% of the promoter activity, or at least about 80% of the promoter activity, or at least about 85% of the promoter activity, or at least about 90% of the promoter activity, or at least about 95% of the promoter activity of the corresponding unmodified promoter sequence of SEQ ID NO: 91 (SP0412) or SEQ ID NO: 92 (SP0422), respectively.

[0424] In some embodiments, a functional variant of a liver-specific promoter disclosed herein retains a significant level of sequence identity to the unmodified promoter sequence. Suitably functional variants comprise a sequence that is at least 60% identical to the unmodified promoter sequence, more preferably at least 70%, 80%, 90%, 95% or 99% identical to the unmodified liver-specific promoter sequence.

[0425] In some embodiments, a functional fragment of a liver-specific promoter disclosed herein retains a significant level of sequence identity to the unmodified promoter sequence. Suitable functional fragments comprise a sequence that is at least 60% identical to the unmodified promoter sequence, more preferably at least 70%, 80%, 90%, 95% or 99% identical to the unmodified liver-specific promoter sequence.

[0426] In some embodiments, a functional variant of a promoter element can be viewed as a promoter element which, when substituted in place of a reference promoter element in a promoter, substantially retains its activity. For example, a liver-specific promoter which comprises a functional variant of a given promoter element preferably retains at least 80% of its activity, more preferably at least 90% of its activity, more preferably at least 95% of its activity, and yet more preferably 100% of its activity (compared to the reference promoter comprising the unmodified promoter element). Suitable assays for assessing liver-specific promoter activity are disclosed herein, e.g. in Examples 12 and 13.

[0427] It should be noted that the sequences of a liver-specific promoter as disclosed herein in Table 4, or any LSP selected from SEQ ID NO: 270-341 or 342-430 can be altered without causing a substantial loss of activity. Thus, functional variants of a liver-specific promoter are discussed below can be prepared by modifying the sequence of a liver-specific promoter disclosed in Table 4 herein, or any or any LSP selected from SEQ ID NO: 270-341 or 342-430, provided that modifications which are significantly detrimental to activity of the liver-specific promoter are avoided. In view of the information provided in the present disclosure, modification of a liver-specific promoter disclosed herein in Table 4, or any LSP selected from SEQ ID NO: 270-341 or 342-430 to provide functional variants is straightforward. Moreover, the present disclosure provides methodologies for simply assessing the functionality of any given liver-specific promoter variant. Functional variants for each liver-specific promoter are discussed below.

[0428] In some embodiments of the invention the synthetic liver-specific promoter comprises a sequence from the group consisting of: any promoter listed from SEQ ID NOS: 86 (CRM 0412), SEQ ID NO: 91 (SP0412) or SEQ ID NO: 92 (SP0422), SEQ ID NOS: 93 (SP0239), SEQ ID NO: 94 (SP0265, also referred to SP131_A1), SEQ ID NO: 95 (SP0240) or SEQ ID NO: 96 (SP0246), or SEQ ID NO: 146 (SP0265-UTR), SEQ ID NO: 147 (SP0239-UTR), SEQ ID NO: 148 (SP0240-UTR), SEQ ID NO: 149 (SP0246-UTR) or SEQ ID NO: 150 (SP0131-A1-UTR), or any LSP selected from SEQ ID NO: 270-341 or 342-430, or a functional variant of any thereof. Suitably the functional variant of any of said liver-specific promoter comprises a sequence that is at least 70% identical to the reference synthetic liver-specific promoter, more preferably at least 80%, 90%, 95% or 99% identical to the reference synthetic liver-specific promoter.

[0429] In some embodiments, the functional variant thereof may suitably comprise a sequence that is at least 60%, 70%, 80%, 90%, 95% or 99% identical to any one of the sequences listed in Table 4. Additionally or alternatively, a functional variant of any one of the sequences listed in Table 4, suitably comprises a sequence which hybridizes under stringent conditions to the reference sequence. Functional variants of any one of the sequences listed in Table 4 include variants in which one or more of the sequence provided therein has been replaced with a functional variant thereof as defined above, and/or where the order of the sequences provided therein has been altered.

[0430] In some embodiments, a functional variant of any one of the liver-specific promoter sequences listed in Table 4 can be viewed as a liver-specific promoter, when at least one or more nucleotides are substituted and it substantially retains its activity. For example, a liver-specific promoter which comprises a functional variant of any one of the liver-specific promoter sequences listed in Table 4 preferably retains 80% of its activity, more preferably 90% of its activity, more preferably 95% of its activity, and yet more preferably 100% of its activity (compared to the reference promoter sequence). For example, if a LSP comprises a nucleic acid sequence comprising SP0412 (SEQ ID NO: 91) as an example, a portion of nucleotides in SP0412 (e.g., SEQ ID NO:91) in can be replaced with a functional variant of thereof, and the liver specific SP0412 promoter substantially retains its activity. Retention of activity can be assessed by comparing expression of a suitable reporter under the control of the reference promoter with an otherwise identical promoter comprising the substituted nucleic acids under equivalent conditions. Suitable assays for assessing liver-specific promoter activity are disclosed herein, e.g. in examples 12 and 13.

[0431] In some embodiments of the compositions and methods disclosed herein, a synthetic liver-specific promoter disclosed herein in Table 4, or any promoter listed from SEQ ID NOS: 86 (CRM 0412), SEQ ID NO: 91 (SP0412) or SEQ ID NO: 92 (SP0422), SEQ ID NOS: 93 (SP0239), SEQ ID NO: 94 (SP0265, also referred to SP131 A1), SEQ ID NO: 95 (SP0240) or SEQ ID NO: 96 (SP0246), or SEQ ID NO: 146 (SP0265-UTR), SEQ ID NO: 147 (SP0239-UTR), SEQ ID NO: 148 (SP0240-UTR), SEQ ID NO: 149 (SP0246-UTR) or SEQ ID NO: 150 (SP0131-A1-UTR), or any LSP selected from SEQ ID NO: 270-341 or 342-430 is a functional variant thereof that has length of 700, 600, 500, 450, 400, 350, 300, 250 or 200 or 150 or fewer nucleotides.

[0432] In some embodiments of the compositions and methods disclosed herein, the synthetic liver-specific promoter disclosed herein in Table 4, any promoter listed from SEQ ID NOS: 86 (CRM 0412), SEQ ID NO: 91 (SP0412) or SEQ ID NO: 92 (SP0422), SEQ ID NOS: 93 (SP0239), SEQ ID NO: 94 (SP0265, also referred to SP131_A1), SEQ ID NO: 95 (SP0240) or SEQ ID NO: 96 (SP0246), or SEQ ID NO: 146 (SP0265-UTR), SEQ ID NO: 147 (SP0239-UTR), SEQ ID NO: 148 (SP0240-UTR), SEQ ID NO: 149 (SP0246-UTR) or SEQ ID NO: 150 (SP0131-A1-UTR), or any LSP selected from SEQ ID NO: 270-341 or 342-430, comprises a synthetic liver-specific cis-regulatory element (CRE) or cis-regulatory module (CRM) operably linked to a minimal promoter. Examples of suitable minimal promoters for use in the present invention include, but are not limited to, the CMV-minimal promoter, MinTk minimal promoter, and the LVR_CRE0052_G6PC minimal promoter (SEQ ID NO: 126). In particular embodiments, the minimal promoter is the CMV-IE promoter comprising the sequence of SEQ ID NO: 145, a sequence that is at least 60%, 70%, 80%, 90%, 95% or 99% identical to SEQ ID NO: 145 Exemplary promoters comprising a CMV-IE for use in the methods and compositions disclosed herein can be selected from, but are not limited to, SEQ ID NO: 92 (SP0422), SEQ ID NO: 146 (SP0265-UTR), SEQ ID NO: 147 (SP0239-UTR), SEQ ID NO: 148 (SP0240-UTR), SEQ ID NO: 149 (SP0246-UTR) or SEQ ID NO: 150 (SP0131-A1-UTR).

[0433] In some embodiments of the compositions and methods disclosed herein, a synthetic liver-specific promoter disclosed herein in Table 4, e.g., any promoter listed from SEQ ID NOS: 86 (CRM 0412), SEQ ID NO: 91 (SP0412) or SEQ ID NO: 92 (SP0422), SEQ ID NOS: 93 (SP0239), SEQ ID NO: 94 (SP0265, also referred to SP131 A1), SEQ ID NO: 95 (SP0240) or SEQ ID NO: 96 (SP0246), or SEQ ID NO: 146 (SP0265-UTR), SEQ ID NO: 147 (SP0239-UTR), SEQ ID NO: 148 (SP0240-UTR), SEQ ID NO: 149 (SP0246-UTR) or SEQ ID NO: 150 (SP0131-A1-UTR), or any LSP selected from SEQ ID NO: 270-341 or 342-430 is able to increase expression of gene in the liver of a subject or in a liver cell by at least 20%, at least 40%, at least 60%, at least 80%, at least 100%, at least 200%, at least 300%, at least 500%, at least 1000% or more relative to the LP-1 promoter (SEQ ID NO: 432).

[0434] In some embodiments of the compositions and methods disclosed herein, the synthetic liver-specific promoter disclosed herein in Table 4,or any LSP promoter selected from SEQ ID NOS: 86, 91-96, 146-150, or any LSP selected from SEQ ID NO: 270-341 or 342-430, a synthetic liver-specific promoter is able to promote liver-specific transgene expression and has an activity in liver cells which is at least 15%, 20%, 30%, 40%, 50%, 60%, 70%, 80%, 90%, 100%, 125%, 150%, 175%, 200%, 250%, 300%, 350% or 400% of the activity of the TTR promoter (SEQ ID NO: 431).

[0435] In some embodiments of the compositions and methods disclosed herein, the synthetic liver-specific promoter disclosed herein in Table 4, or any LSP promoter selected from SEQ ID NOS: 86, 91-96, 146-150, or any LSP selected from SEQ ID NO: 270-341 or 342-430, a synthetic liver-specific promoter is able to promote liver-specific transgene expression and has an activity in liver cells which is at least 15%, 20%, 30%, 40%, 50%, 60%, 70%, 80%, 90%, 100%, 125%, 150%, 175%, 200%, 250%, 300%, 350% or 400% of the activity of the TBG promoter (SEQ ID NO: 435).

### G. Intron Sequence

[0436] In some embodiments, the rAAV genotype comprises an intron sequence located 3′ of the promoter sequence and 5′ of the secretory signal peptide. Intron sequences serve to increase one or more of: mRNA stability, mRNA transport out of nucleus and/or expression and/or regulation of the expressed GAA fusion polypeptide (e.g., SS-GAA fusion polypeptide or SS-IGF2-GAA polypeptide). In alternative embodiments, a rAAV genotype does not comprise an intron sequence.

[0437] In some embodiments, the intron sequence is a MVM intron sequence, for example, but not limited to and intron sequence of SEQ ID NO: 13 or nucleic acid sequence having at least 80%, 85%, 90%, 95%, 96%, 97%, 98% or 99% nucleotide sequence identity thereto.

[0438] In some embodiments, the intron sequence is a HBB2 intron sequence, for example, but not limited to and intron sequence of SEQ ID NO: 14 or nucleic acid sequence having at least 80%, 85%, 90%, 95%, 96%, 97%, 98% or 99% nucleotide sequence identity thereto.

[0439] In some embodiments of the methods and compositions disclosed herein, a recombinant AAV vector comprises a heterologous nucleic acid sequence that further comprises an intron sequence located 5′ of the sequence encoding the secretory signal peptide, and 3′ of the promoter. In some embodiments, the intron sequence comprises a MVM sequence or a HBB2 sequence, wherein the MVM sequence comprises the nucleic acid sequence of SEQ ID NO: 13, or a nucleic acid sequence at least about 75%, or 80%, or 85%, or 90%, or 95%, or 98%, or 99% sequence identity to SEQ ID NO: 13, and the HBB2 sequence comprises the nucleic acid sequence of SEQ ID NO: 14, or a nucleic acid sequence at least about 75%, or 80%, or 85%, or 90%, or 95%, or 98%, or 99% sequence identity to SEQ ID NO: 14.

[0440] In some embodiments, the rAAV genotype comprises an intron sequence selected in the group consisting of a human beta globin b2 (or HBB2) intron, a FIX intron, a chicken beta-globin intron, and a SV40 intron. In some embodiments, the intron is optionally a modified intron such as a modified HBB2 intron (see, e.g., SEQ ID NO: 17 in of WO2018046774A1): a modified FIX intron (see., e.g., SEQ ID NO: 19 in WO2018046774A1), or a modified chicken beta-globin intron (e.g., see SEQ ID NO: 21 in WO2018046774A1), or modified HBB2 or FIX introns disclosed in WO2015/162302, which are incorporated herein in their entirety by reference.

### H. Poly-A

[0441] In some embodiments, an rAAV vector genome includes at least one poly-A tail that is located 3′ and downstream from the heterologous nucleic acid gene encoding the in one embodiment, a GAA fusion polypeptide (e.g., SS-GAA fusion polypeptide or SS-IGF2-GAA polypeptide). In some embodiments, the polyA signal is 3′ of a stability sequence or CS sequence as defined herein. Any polyA sequence can be used, including but not limited to hGH poly A, synpA polyA and the like. In some embodiments, the polyA is a synthetic polyA sequence. In some embodiments, the rAAV vector genome comprises two poly-A tails, e.g., a hGH poly A sequence and another polyA sequence, where a spacer nucleic acid sequence is located between the two poly A sequences. In some embodiments, the rAAV genome comprises 3′ of the nucleic acid encoding the GAA fusion polypeptide (e.g., SS-GAA fusion polypeptide or SS-IGF2-GAA polypeptide), or alternatively, 3′ of the CS sequence the following elements; a first polyA sequence, a spacer nucleic acid sequence (of between 100-400 bp, or about 250 bp), a second poly A sequence, a spacer nucleic acid sequence, and the 3′ ITR. In some embodiments, the first and second poly A sequence is a hGH poly A sequence, and in some embodiments, the first and second poly A sequences are a synthetic poly A sequence. In some embodiments, the first poly A sequence is a hGH poly A sequence and the second poly A sequence is a synthetic sequence, or vice versa—that is, in alternative embodiments, the first poly A sequence is a synthetic poly A sequence and the second poly A sequence is a hGH polyA sequence. An exemplary poly A sequence is, for example, SEQ ID NO: 15 (hGH poly A sequence), or a poly A nucleic acid sequence having at least 80%, 85%, 90%, 95%, 96%, 97%, 98% or 99% nucleotide sequence identity to SEQ ID NO: 15. In some embodiments, the hGH poly sequence encompassed for use is described in Anderson et al. J. Biol. Chem 264(14); 8222-8229, 1989 (See, e.g. p. 8223, 2nd column, first paragraph) which is incorporated herein in its entirety by reference.

[0442] In some embodiments, a poly-A tail can be engineered to stabilize the RNA transcript that is transcribed from an rAAV vector genome, including a transcript for a heterologous gene, which in one embodiment is a GAA, and in alternative embodiments, the poly-A tail can be engineered to include elements that are destabilizing.

[0443] In some embodiments of the methods and compositions disclosed herein, a recombinant AAV vector comprises at least one polyA sequence located 3′ of the nucleic acid encoding the GAA gene and 5′ of the 3′ ITR sequence. In some embodiments, the poly A is a full length poly A (fl-polyA) sequence. In some embodiments, the polyA is a truncated polyA sequence, see. e.g., FIG. 5G.

[0444] In an embodiment, a poly-A tail can be engineered to become a destabilizing element by altering the length of the poly-A tail. In an embodiment, the poly-A tail can be lengthened or shortened. In some embodiments, the 3′ untranslated region comprises GAA 3′ UTR (SEQ ID NO: 85) or a 3′ UTR (SEQ ID NO: 77).

[0445] In another embodiment, a destabilizing element is a microRNA (miRNA) that has the ability to silence (repress translation and promote degradation) the RNA transcripts the miRNA binds to that encode a heterologous gene. In an embodiment, addition or deletion of seed regions within the poly-A tail can increase or decrease expression of a protein, such as the GAA protein or modified GAA polypeptide.

[0446] In another embodiment, seed regions can also be engineered into the 3′ untranslated regions located between the heterologous gene and the poly-A tail. In a further embodiment, the destabilizing agent can be an siRNA. The coding region of the siRNA can be included in an rAAV vector genome and is generally located downstream, 3′ of the poly-A tail.

[0447] In all aspects of the methods and compositions as disclosed herein, the rAAV genome may also comprise a Stuffer DNA nucleic sequence. An exemplary stuffer DNA sequence is SEQ ID NO: 71, or a nucleic acid sequence having at least 80%, 85%, 90%, 95%, 96%, 97%, 98% or 99% nucleotide sequence identity thereto. As shown in FIGS. 7-8 and FIGS. 9A-9E, the stuffer sequence is located 3 of the poly A tail, for example, and is located 5‘ of the’3 ITR sequence. In some embodiments, the stuffer DNA sequence comprises a synthetic polyadenylation signal in the reverse orientation.

[0448] In some embodiments, a stuffer nucleic acid sequence (also referred to as a “spacer” nucleic acid fragment, see FIGS. 7-8) can be located between the poly A sequence and the 3′ ITR (i.e., a stuffer nucleic acid sequence is located 3′ of the polyA sequence and 5′ of the 3′ ITR) (see, e.g., FIG. 7-8). Such a stuffer nucleic acid sequence can be about 30 bp, 50pb, 75 bp, 100 bp, 150 bp, 200 bp, 250 bp, 300 bp or longer than 300 bp. In some embodiments of the methods and compositions as disclosed herein, a stuffer nucleic acid fragment is between 20-50 bp, 50-100 bp, 100-200 bp, 200-300 bp, 300-500 bp, or any integer between 20-500 bp. Exemplary stuffer (or spacer) nucleic acid sequence comprise SEQ ID NO: 16, SEQ ID NO: 71 or SEQ ID NO: 78, or a nucleic acid sequence at least about 70, 71, 72, 73, 74, 75, 76, 77, 78, 79, 80, 81, 82, 83, 84, 85, 86, 87, 88, 89, 90, 91, 92, 93, 94, 95, 96, 97, 98, 99%, identical to SEQ ID NO: 16 or SEQ ID NO: 71 or SEQ ID NO: 78.

### I. AAV ITRs

[0449] The rAAV genome as disclosed here comprises AAV ITRs that have desirable characteristics and can be designed to modulate the activities of, and cellular responses to vectors that incorporate the ITRs. In another embodiment, the AAV ITRs are synthetic AAV ITRs that has desirable characteristics and can be designed to manipulate the activities of and cellular responses to vectors comprising one or two synthetic ITRs, including, as set forth in U.S. Pat. No. 9,447,433, which is incorporated herein by reference.

[0450] In another embodiment, an ITR exhibits modified transcription activity relative to a naturally occurring ITR, e.g., ITR2 from AAV2. It is known that the ITR2 sequence inherently has promoter activity. It also inherently has termination activity, similar to a poly(A) sequence. The minimal functional ITR of the present invention exhibits transcription activity as shown in the examples, although at a diminished level relative to ITR2. Thus, in some embodiments, the ITR is functional for transcription. In other embodiments, the ITR is defective for transcription. In certain embodiments, the ITR can act as a transcription insulator, e.g., preventing transcription of a transgenic cassette present in the vector when the vector is integrated into a host chromosome.

[0451] One aspect of the invention relates to an rAAV vector genome comprising at least one synthetic AAV ITR, wherein the nucleotide sequence of one or more transcription factor binding sites in the ITR is deleted and/or substituted, relative to the sequence of a naturally occurring AAV ITR such as ITR2. In some embodiments, it is the minimal functional ITR in which one or more transcription factor binding sites are deleted and/or substituted. In some embodiments at least 1 transcription factor binding site is deleted and/or substituted, e.g., at least 5 or more or 10 or more transcription factor binding sites, e.g., at least 1, 2, 3, 4, 5, 6, 7, 8, 9, 10, 11, 12, 13, 14, 15, 16, 17, 18, 19, 20, or 21 transcription factor binding sites.

[0452] Another embodiment, a rAAV vector, including an rAAV vector genome as described herein comprises a polynucleotide comprising at least one synthetic AAV ITR, wherein one or more CpG islands (a cytosine base followed immediately by a guanine base (a CpG) in which the cytosines in such arrangement tend to be methylated) that typically occur at, or near the transcription start site in an ITR are deleted and/or substituted. In an embodiment, deletion or reduction in the number of CpG islands can reduce the immunogenicity of the rAAV vector. This results from a reduction or complete inhibition in TLR-9 binding to the rAAV vector DNA sequence, which occurs at CpG islands. It is also well known that methylation of CpG motifs results in transcriptional silencing. Removal of CpG motifs in the ITR is expected to result in decreased TLR-9 recognition and/or decreased methylation and therefore decreased transgene silencing. In some embodiments, it is the minimal functional ITR in which one or more CpG islands are deleted and/or substituted. In an embodiment, AAV ITR2 is known to contain 16 CpG islands of which one or more, or all 16 can be deleted.

[0453] In some embodiments, at least 1 CpG motif is deleted and/or substituted, e.g., at least 4 or more or 8 or more CpG motifs, e.g., at least 1, 2, 3, 4, 5, 6, 7, 8, 9, 10, 11, 12, 13, 14, 15, or 16 CpG motifs.

[0454] In another embodiment, the synthetic ITR comprises, consists essentially of, or consists of one of the nucleotide sequences listed in Table 7. In other embodiments, the synthetic ITR comprises, consist essentially of, or consist of a nucleotide sequence that is at least 80% identical, e.g., at least 85%, 90%, 95%, 96%, 97%, 98%, or 99% identical to any one of the nucleotide sequences listed in Table 7. In some embodiments, the ITR is a sequence is disclosed in FIG. 1 of Samulski et al., 1983, Cell, 33; 135-143 (referred to “Samulski et al, 1983” as which is incorporated herein in its entirety by reference), which discloses modified ITR sequences in FIG. 1. In some embodiments, the ITR sequence comprises, or consists of a nucleotide sequence that is at least 80% identical, e.g., at least 85%, 90%, 95%, 96%, 97%, 98%, or 99% identical to one of the ITR sequences in FIG. 1 as disclosed in Samulski et al, 1993. In some embodiments, the ITR comprises, or consists of a nucleotide sequence that is at least 80% identical, e.g., at least 85%, 90%, 95%, 96%, 97%, 98%, or 99% or 99.5% identical to the ITR sequence of pSM 609 right disclosed in the middle panel of FIG. 1 (that lacks the 9 bp) disclosed in Samulski et al, 1983. In some embodiments, the ITR comprises a nucleotide sequence that is at least 80% identical, e.g., at least 85%, 90%, 95%, 96%, 97%, 98%, or 99% or 99.5% identical to the ITR sequence of any of SEQ ID NOs: 441-444. In some embodiments, the ITR sequence, e.g., Right ITR (or 3′ ITR) is SEQ ID NO: 442 or a nucleotide sequence that is at least 80% identical, e.g., at least 85%, 90%, 95%, 96%, 97%, 98%, or 99% or 99.5% identical to SEQ ID NO: 442. In some embodiments, the ITR sequence, e.g., left ITR (or 5′ ITR) is SEQ ID NO: 441 or a nucleotide sequence that is at least 80% identical, e.g., at least 85%, 90%, 95%, 96%, 97%, 98%, or 99% or 99.5% identical to SEQ ID NO: 441.

TABLE 7
Exemplary synthetic ITR sequences

| | |
|---|---|
| MH-257 | AGGAACCCCTAGTGATGGAGTTGGCCACTCCCTCTCTGCGCGCTCGCTCG |
| | CTCACTGAGGCAATTTGATAAAAATCGTCAAATTATAAACAGGCTTTGCC |
| | TGTTTAGCCTCAGTGAGCGAGCGAGCGCGCAGAGAGGGAGTGGCCAACT |
| | CCATCACTAGGGGTTCCT (SEQ ID NO: 36) |
| MH-258 | AGGAACCCCTAGTGATGGAGTTGGCCACTCCCTCTCTGCGCGCTCGCTCG |
| | CTCACTGAGGGATAAAAATCCAGGCTTTGCCTGCCTCAGTGAGCGAGCG |
| | AGCGCGCAGAGAGGGAGTGGCCAACTCCATCACTAGGGGTTCCT (SEQ |
| | ID NO: 37) |
| MH Delta | AGGAACCCCTAGTGATGGAGTTGGCCACTCCCTCTCTGCGCGCTCGCTCG |
| 258 | CTCACTGAGGGATAAAAATCCAGGCTTTGCCTGCCTCAGTGAGCGAGCG |
| | AGCGCGCAGAGAGGGAGTGGCCAACTCCATCACTAGGGGTTCCT (SEQ |
| | ID NO: 38) |
| MH Telomere-1 | AGGAACCCCTAGTGATGGAGTTGGCCACTCCCTCTCTGGGATTGGGATTG |
| ITR | CGCGCTCGCTCGCGGGATTGGGATTGGGATTGGGATTGGGATTGGGATTG |
| | ATAAAAATCAATCCCAATCCCAATCCCAATCCCAATCCCAATCCCGCGAG |
| | CGAGCGCGCAATCCCAATCCCAGAGAGGGAGTGGCCAACTCCATCACTA |
| | GGGGTTCCT (SEQ ID NO: 39) |
| MH Telomere-2 | AGGAACCCCTAGTGATGGAGTTGGCCACTCCCTCTCTGCGCGCTCGCTCG |
| ITR | CTCGGGATTGGGATTGGGATTGGGATTGGGATTGGGATTGATAAAAATC |
| | AATCCCAATCCCAATCCCAATCCCAATCCCAATCCCGCGAGCGAGCGCGC |
| | AGGAGAGGGAGTGGCCAACTCCATCACTAGGGGTTCCTAAGCTTATTAT |
| | A (SEQ ID NO: 40) |
| MH PoIII 258 | AGGAACCCCTAGTGATGGAGTTGGCCACTCCCTCTCTGCGCGCTCGCTCG |
| ITR | CTCACTGAGGGCGCCTATAAAGATAAAAATCCAGGCTTTGCCTGCCTCAG |
| | TTAGCGAGCGAGCGCGCAGAGAGGGAGTGGCCAACTCCATCACTAGGGG |
| | TTCCT(SEQ ID NO: 41) |
| MH 258 | CTAGTGATGGAGTTGGCCACTCCCTCTCTGCGCGCTCGCTCGCTCACTGA |
| Delta D | GGGATAAAAATCCAGGCTTTGCCTGCCTCAGTGAGCGAGCGAGCGCGCA |
| conservative | GAGAGGGAGTGGCCAACTCCATCACTAG (SEQ ID NO: 42) |
| 5′ ITR | TTGGCCACTCCCTCTCTGCGCGCTCGCTCGCTCACTGAGGCCGGGCGACC |
| | AAAGGTCGCCCGACGCCCGGGCTTTGCCCGGGCGGCCTCAGTGAGCGAG |
| | CGAGCGCGCAGAGAGGGAGTGGCCAACTCCATCACTAGGGGTTCCT (SEQ |
| | ID NO: 161) |
| 3′ ITR | AGGAACCCCTAGTGATGGAGTTGGCCACTCCCTCTCTGCGCGCTCGCTCG |
| | CTCACTGAGGCCGGGCGACCAAAGGTCGCCCGACGCCCGGGCTTTGCCC |
| | GGGCGGCCTCAGTGAGCGAGCGAGCGCGCAGAGAGGGAGTGGCCAA |
| | (SEQ ID NO: 165) |
| L-ITR | CTGCGCGCTCGCTCGCTCACTGAGGCCGCCCGGGCAAAGCCCGGGCGTC |
| | GGGCGACCTTTGGTCGCCCGGCCTCAGTGAGCGAGCGAGCGCGCAGAGA |
| | GGGAGTGGCCAACTCCATCACTAGGGGTTCCT (SEQ ID NO: 441) |
| R-ITR | AGGAACCCCTAGTGATGGAGTTGGCCACTCCCTCTCTGCGCGCTCGCTCG |
| | CTCACTGAGGCCGGGCGACCAAAGGTCGCCCGACGCCCGGGCTTTGCCC |
| | GGGCGGCCTCAGTGAGCGAGCGAGCGCGCAG (SEQ ID NO: 442) |
| ITR (145 bp) | AGGAACCCCTAGTGATGGAGTTGGCCACTCCCTCTCTGCGCGCTCGCTCG |
| | CTCACTGAGGCCGGGCGACCAAAGGTCGCCCGACGCCCGGGCTTTGCCC |
| | GGGCGGCCTCAGTGAGCGAGCGAGCGCGCAGAGAGGGAGTGGCCAA |
| | (SEQ ID NO: 443) |
| ITR (145 bp- | AGGAACCCCTAGTGATGGAGTTGGCCACTCCCTCTCTGCGCGCTCGCTCG |
| 1983, lacking | CTCACTGAGGCCGGGCGACCAAAGGTCGCCCGACGCCCGGGCTTTGCCC |
| 9 bp) | GGGCGGCCTCAGTGAGCGAGCGAGCGCGCAGAGAGGG (SEQ ID NO: 444) |

J. Exemplary rAAV Genome Elements:

### (i) AAV-LVR412

[0455] In some embodiments, the rAAV comprises in its genome, a construct comprising in a 5′ to 3′ direction, a 5′ AAV2-ITR (SEQ ID NO: 161), stuffer DNA (SEQ ID NO: 162), SP0412 LSP (SEQ ID NO: 91), Kozak sequence for Glue (SEQ ID NO: 153), a nucleic acid sequence encoding GAA polypeptide (SEQ ID NO: 182), a 3′ UTR (SEQ ID NO: 77), poly A sequence (SEQ ID NO: 164), a 3′ AAV-ITR sequence (SEQ ID NO: 165). An exemplary construct is shown as SEQ ID NO: 154 (LVR412_AskBioEU). One can readily change the ITRs sequences of SEQ ID NO: 161 and 165 for any ITR sequences for different AAV serotypes, or for ITRs selected from any of SEQ ID Nos: 441-444, as well as use a different UTR sequence or polyA sequence instead of SEQ ID NO: 77 and SEQ ID NO: 164, respectively.

[0456] In some embodiments, the rAAV comprises in its genome, a construct comprising in a 5′ to 3′ direction, a 5′ AAV2-ITR (SEQ ID NO: 161), stuffer DNA (SEQ ID NO: 162), SP0412 LSP (SEQ ID NO: 91), a nucleic acid sequence encoding GAA polypeptide (SEQ ID NO: 182), a 3′ UTR (SEQ ID NO: 77), a poly A sequence (SEQ ID NO: 166), a 3′ AAV-ITR sequence (SEQ ID NO: 165). An exemplary construct is shown as SEQ ID NO: 155 (ssAAV_LVR412WT-hGAA_AskBio_CHATHAM_Backbone Ask). One can readily change the ITRs sequences of SEQ ID NO: 161 and 165 for any ITR sequences for different AAV serotypes, or for ITRs selected from any of SEQ ID Nos: 441-444, as well as use a different UTR sequence or polyA sequence instead of SEQ ID NO: 77 and SEQ ID NO: 164, respectively.

[0457] AAV2-LVP422:

[0458] In some embodiments, the rAAV comprises in its genome, a construct comprising in a 5′ to 3′ direction, a 5′ AAV2-ITR (SEQ ID NO: 161), stuffer DNA, SP0422 LSP (SEQ ID NO: 92), Kozak sequence for Glue (SEQ ID NO: 153), a nucleic acid sequence encoding GAA polypeptide (SEQ ID NO: 55), a collagen stability sequence (SEQ ID NO: 65), a poly A sequence (SEQ ID NO: 164), a 3′ AAV-ITR sequence (SEQ ID NO: 165). An exemplary construct is shown as SEQ ID NO: 156 (LVR412Stuffer). One can readily change the ITRs sequences of SEQ ID NO: 161 and 165 for any ITR sequences for different AAV serotypes, or for ITRs selected from any of SEQ ID Nos: 441-444 as well as use a different collagen stability sequence or polyA sequence instead of SEQ ID NO: 65 and SEQ ID NO: 164, respectively.

[0459] In some embodiments, the rAAV comprises in its genome, a construct comprising in a 5′ to 3′ direction, a 5′ AAV2-ITR (SEQ ID NO: 161), stuffer DNA, SP0422 LSP (SEQ ID NO: 92), Kozak sequence for Glue (SEQ ID NO: 153), a nucleic acid sequence encoding GAA polypeptide (SEQ ID NO: 182), a 3′ UTR sequence (SEQ ID NO: 77), a poly A sequence (SEQ ID NO: 164), optionally comprising a AATAA stop signal, a 3′ AAV-ITR sequence (SEQ ID NO: 165). An exemplary construct is shown as SEQ ID NO: 157 (LVR422AskBio EU construct). One can readily change the ITRs sequences of SEQ ID NO: 161 and 165 for any ITR sequences for different AAV serotypes or for ITRs selected from any of SEQ ID Nos: 441-444, as well as use a different UTR sequence or polyA sequence instead of SEQ ID NO: 77 and SEQ ID NO: 164, respectively

[0460] One can readily change the ITRs sequences in the rAAV genomes of SEQ ID Nos: 160, 159, 155, 158, 156 for any ITR sequences for different AAV serotypes or for ITRs of SEQ ID NOs: 441-444, as well as use a different UTR sequence or polyA sequence, as disclosed herein.

[0461] In some embodiments, the rAAV vector or rAAV genome comprises a heterologous nucleic acid sequence encoding a GAA polypeptide comprising SEQ ID NO: 170 (GAA polypeptide with a cognate GAA signal sequence and H199R, R223H modifications), or SEQ ID NO: 171 (GAA polypeptide with a cognate GAA signal sequence and H199R, H201L and R223H modifications). The GAA polypeptide of SEQ ID NO: 170 is encoded by the nucleic acid sequence of SEQ ID NO: 182. Accordingly, in some embodiments, the rAAV vector comprises a nucleic acid of SEQ ID NO: 182 encoding a modified GAA polypeptide comprising H199R, R223H modifications. The GAA polypeptide of SEQ ID NO: 171 is encoded by the nucleic acid sequence of SEQ ID NO: 182 where basepairs (bp) 667-669 of SEQ ID NO: 182 are changed from CAC to any of: UUA, UUG, CUU, CUC CUA, CUG (resulting in a Histadine (H) to Leucine (L) amino acid change); or where bp 668 of SEQ ID NO: 182 is changed from A to U (resulting in a Histadine (H) to Leucine (L) amino acid change). Accordingly, in some embodiments, the rAAV vector comprises a nucleic acid of SEQ ID NO: 182, where bp 667-669 of SEQ ID NO: 182 are changed from CAC to any of: UUA, UUG, CUU, CUC CUA, CUG); or where bp 668 of SEQ ID NO: 182 is changed from A to U, which encodes a modified GAA polypeptide comprising H199R, H201L and R223H modifications.

[0462] In some embodiments, the rAAV vector or rAAV genome comprises a heterologous nucleic acid sequence encoding a GAA polypeptide selected from any of: SEQ ID NO: 172 (GAA polypeptide where cognate signal peptide is replaced with a IgG signal sequence and H199R, R223H modifications), or a sequence at least 85% sequence identity to SEQ ID NO: 172, or SEQ ID NO: 173 (GAA polypeptide where cognate signal peptide is replaced with a wtIL2 signal sequence and H199R and R223H modifications), or a sequence at least 85% sequence identity to SEQ ID NO: 173, or SEQ ID NO: 174 (GAA polypeptide where cognate signal peptide is replaced with a mutIL3 signal sequence and H199R and R223H modifications) or a sequence at least 85% sequence identity to SEQ ID NO: 174.

[0463] In some embodiments, the rAAV vector or rAAV genome comprises a heterologous nucleic acid sequence comprising SEQ ID NO: 182 where bp 1-81 of SEQ ID NO: 182 is replaced with the nucleic acid of SEQ ID NO: 177 (IgG signal sequence), which encodes a GAA polypeptide of SEQ ID NO: 172 (IgG leader-GAA with H199R and R223H modifications). In some embodiments, the rAAV vector comprises a heterologous nucleic acid sequence comprising SEQ ID NO: 182, where bp 668 of SEQ ID NO: 182 is changed from A to U and where bp 1-81 of SEQ ID NO: 182 is replaced with the nucleic acid of SEQ ID NO: 177 (IgG signal peptide), or a sequence at least 85% sequence identity thereto, which encodes a GAA polypeptide of SEQ ID NO: 172 (IgG leader-GAA with H199R, H201L and R223H modifications).

[0464] In some embodiments, the rAAV vector or rAAV genome comprises a heterologous nucleic acid sequence comprising SEQ ID NO: 182 where bp 1-81 of SEQ ID NO: 182 is replaced with the nucleic acid of SEQ ID NO: 179 (wt IL2 signal peptide), or a sequence at least 85% sequence identity thereto, which encodes a GAA polypeptide of SEQ ID NO: 173 (wt IL2 signal peptide-GAA with H199R, R223H modifications). In some embodiments, the rAAV vector comprises a heterologous nucleic acid sequence comprising SEQ ID NO: 182, where bp 668 of SEQ ID NO: 182 is changed from A to U and where bp 1-81 of SEQ ID NO: 182 is replaced with the nucleic acid of SEQ ID NO: 179 (wt IL2 signal peptide), or a sequence at least 85% sequence identity thereto, which encodes a GAA polypeptide of SEQ ID NO: 173 (wt IL2 signal peptide-GAA with H199R, H201L R223H modifications).

[0465] In some embodiments, the rAAV vector comprises a heterologous nucleic acid sequence comprising SEQ ID NO: 182 where bp 1-81 of SEQ ID NO: 182 is replaced with the nucleic acid of SEQ ID NO: 181 (mutIL2 signal peptide), or a sequence at least 85% sequence identity thereto, which encodes a GAA polypeptide of SEQ ID NO: 174 (mutIL2 signal peptide-GAA with H199R, R223H modifications). In some embodiments, the rAAV vector comprises a heterologous nucleic acid sequence comprising SEQ ID NO: 182, where bp 668 of SEQ ID NO: 182 is changed from A to U and where bp 1-81 of SEQ ID NO: 182 is replaced with the nucleic acid of SEQ ID NO: 181 (mut IL2 signal peptide), or a sequence at least 85% sequence identity thereto, which encodes a GAA polypeptide of SEQ ID NO: 174 (mut IL2 signal peptide-GAA with H199R, H201L and R223H modifications).

### III. Vectors and Virions

[0466] In one embodiment, the rAAV vector (also referred to as a rAAV virion) as disclosed herein comprises a capsid protein, and a rAAV genome in the capsid protein. A rAAV capsid of the rAAV virion used to treat Pompe Disease is any of those listed in Table 1 disclosed in U.S. Pat. No. 62,937,556, filed on Nov. 19, 2019, which is incorporated herein in its entirety by reference, or any combination thereof.

[0467] In one embodiment, a rAAV capsid of the rAAV virion used to treat Pompe Disease is any of those listed in Table 1 as disclosed in International Applications WO2020/102645, and WO2020/102667, each of which are incorporated herein in their entirety. In one embodiment, a rAAV capsid of the rAAV virion used to treat Pompe Disease is an AAV8 capsid. In one embodiment, a rAAV vector is an rAAV8 vector.

[0468] In one embodiment, the AAV vector (also referred to as a rAAV virion) as disclosed herein comprises a capsid protein from any of those disclosed in WO2019/241324, which is specifically incorporated herein in its entirety by reference. In some embodiments, the rAAV vector comprises a liver specific capsid, e.g., a liver specific capsid selected from XL32 and XL32.1, as disclosed in WO2019/241324, which is incorporated herein in its entirety by reference. In some embodiments, the rAAV vector is a AAVXL32 or AAVXL32.1 as disclosed in WO2019/241324, which is incorporated herein in its entirety by reference.

[0469] Exemplary chimeric or variant capsid proteins that can be used as the AAV capsid in the rAAV vector described herein can be selected from Table 2 from U.S. provisional application 62,937,556, filed on Nov. 19, 2019, which is specifically incorporated herein in its reference, or can be used with any combination with wild type capsid proteins and/or other chimeric or variant capsid proteins now known or later identified and each is incorporated herein. In some embodiments, the rAAV vector encompassed for use is a chimeric vector, e.g., as disclosed in 9,012,224 and U.S. Pat. No. 7,892,809, which are incorporated herein in their entirety by reference.

[0470] In some embodiments, the rAAV vector is a haploid rAAV vector, as disclosed in US application US2018/0371496 and PCT/US18/22725, or polyploid rAAV vector, e.g., as disclosed in PCT/US2018/044632 filed on Jul. 31, 2018 and in U.S. application Ser. No. 16/151,110, each of which are incorporated herein in their entirety by reference. In some embodiments, the rAAV vector is a rAAV3 vector, as disclosed in 9,012,224 and WO 2017/106236 which are incorporated herein in their entirety by reference.

[0471] In a particular embodiment, the rAAV is a AAVXL32 or AAVXL32.1 AAV vector as disclosed in WO2019/241324, which is incorporated herein in its entirety by reference. In some embodiments, the rAAV vector comprises a capsid disclosed in WO2019241324A1, or International Patent application PCT/US2019/036676, which are incorporated herein in their entirety by reference. In some embodiments, the AAV vector is a AAV8 vector or a rational haploid comprising an AAV8 capsid protein. In some embodiments, the recombinant AAV vector is a chimeric AAV vector, haploid AAV vector, a hybrid AAV vector or polyploid AAV vector. In some embodiments, the recombinant AAV vector is a rational haploid vector, a mosaic AAV vector, a chemically modified AAV vector, or a AAV vector from any AAV serotypes, for example, from any AAV serotype disclosed in Table 1 as disclosed in International Applications WO2020/102645, and WO2020/102667, each of which are incorporated herein in their entirety.

[0472] In some embodiments, the AAV vector comprises a capsid which is encoded by a nucleic acid AAV capsid coding sequence that is at least 90% identical to a nucleotide sequence of any one of SEQ ID NOs: 1-3 as disclosed in WO2019241324A1; or (b) a nucleotide sequence encoding any one of SEQ ID NOS:4-6 as disclosed in WO2019241324A1. In some embodiments, an AAV capsid comprises an amino acid sequence at least 90% identical to any one of SEQ ID NOS:4-6 as disclosed in WO2019241324A1, along with AAV particles comprising an AAV vector genome and the AAV capsid of the invention.

[0473] In one embodiment, the rAAV vector as disclosed herein comprises a capsid protein, associated with any of the following biological sequence files listed in the file wrappers of USPTO issued patents and published applications, which describe chimeric or variant capsid proteins that can be incorporated into the AAV capsid of this invention in any combination with wild type capsid proteins and/or other chimeric or variant capsid proteins now known or later identified (for demonstrative purposes, 11486254 corresponds to U.S. patent application Ser. No. 11/486,254 and the other biological sequence files are to be read in a similar manner): U.S. Ser. Nos. 11/486,254, 11/932,017, 12/172,121, 12/302,206, 12/308,959, 12/679,144, 13/036,343, 13/121,532, 13/172,915, 13/583,920, 13/668,120, 13/673,351, 13/679,684, 14/006,954, 14/149,953, 14/192,101, 14/194,538, 14/225,821, 14/468,108, 14/516,544, 14/603,469, 14/680,836, 14/695,644, 14/878,703, 14/956,934, 15/191,357, 15/284,164, 15/368,570, 15/371,188, 15/493,744, 15/503,120, 15/660,906, and 15/675,677.

[0474] In an embodiment, the AAV capsid proteins and virus capsids of this invention can be chimeric in that they can comprise all or a portion of a capsid subunit from another virus, optionally another parvovirus or AAV, e.g., as described in international patent publication WO 00/28004, which is incorporated by reference. In some embodiments, an rAAV vector genome is single stranded or a monomeric duplex as described in U.S. Pat. No. 8,784,799, which is incorporated herein.

[0475] As a further embodiment, the AAV capsid proteins and virus capsids of this invention can be polyploid (also referred to as haploid) in that they can comprise different combinations of VP1, VP2 and VP3 AAV serotypes in a single AAV capsid as described in US application US2018/0371496, which is incorporated by reference.

[0476] In an embodiment, an rAAV vector useful in the treatment of Pompe Disease as disclosed herein is an AAV3b capsid. AAV3b capsids encompassed for use are described in 2017/106236, and 9,012,224 and 7,892,809, and International application PCT/US19/61653, filed Nov. 15, 2019, and International Applications WO2020/102645, and WO2020/102667, each of which are incorporated herein in their entirety.

[0477] In some embodiments, the AAV3b capsid comprises SEQ ID NO: 44. In an embodiment, the AAV capsid used in the treatment of Pompe Disease can be a modified AAV capsid that is derived in whole or in part from the AAV capsid set forth in SEQ ID NO: 44. In some embodiments, the amino acids from an AAV3b capsid as set forth in SEQ ID NO: 44 can be, or are substituted with amino acids from another capsid of a different AAV serotype, wherein the substituted and/or inserted amino acids can be from any AAV serotype, and can include either naturally occurring or partially or completely synthetic amino acids.

[0478] In another embodiment, an AAV capsid used in the treatment of Pompe Disease is an AAV3b265D capsid. In this particular embodiment, an AAV3b265D capsid comprises a modification in the amino acid sequence of the two-fold axis loop of an AAV3b capsid via replacement of amino acid G265 of the AAV3b capsid with D265. In some embodiments, an AAV3b265D capsid comprises SEQ ID NO: 46. However, the modified virus capsids of the invention are not limited to AAV capsids set forth in SEQ ID NO: 46. In some embodiments, the amino acids from AAV3b265D as set forth in SEQ ID NO. 46 can be, or are substituted with amino acids from a capsid from an AAV of a different serotype, wherein the substituted and/or inserted amino acids can be from any AAV serotype, and can include either naturally occurring or partially or completely synthetic amino acids.

[0479] In another embodiment an rAAV vector useful in the treatment of Pompe Disease as disclosed herein is an AAV3b265D549A capsid. In this particular embodiment, an AAV3b265D549A capsid comprises a modification in the amino acid sequence of the two-fold axis loop of an AAV3b capsid via replacement of amino acid G265 of the AAV3b capsid with D265 and replacement of amino acid T549 of the AAV3b capsid with A549. In some embodiments, an AAV3b265D549A capsid comprises SEQ ID NO: 50. However, the modified virus capsids of the invention are not limited to AAV capsids set forth in SEQ ID NO: 50. In some embodiments, the amino acids from AAV3b265D549A as set forth in SEQ ID NO: 50 can be, or are substituted with amino acids from a capsid from an AAV of a different serotype, wherein the substituted and/or inserted amino acids can be from any AAV serotype, and can include either naturally occurring or partially or completely synthetic amino acids. In some embodiments, the amino acids from AAV3bSASTG (i.e., a AAV3b capsid comprising Q263A/T265 mutations) can be, or are substituted with amino acids from a capsid from an AAV of a different serotype, wherein the substituted and/or inserted amino acids can be from any AAV serotype, and can include either naturally occurring or partially or completely synthetic amino acids.

[0480] In another embodiment, an rAAV vector useful in the treatment of Pompe Disease as disclosed herein is an AAV3b549A capsid. In this particular embodiment, an AAV3b549A capsid comprises a modification in the amino acid sequence of the two-fold axis loop of an AAV3b capsid via replacement of amino acid T549 of the AAV3b capsid with A549. In some embodiments, an AAV3b549A capsid comprises SEQ ID NO: 52. However, the modified virus capsids of the invention are not limited to AAV capsids set forth in SEQ ID NO: 52. In some embodiments, the amino acids from AAV3b549A as set forth in SEQ ID NO: 52 can be, or are substituted with amino acids from a capsid from an AAV of a different serotype, wherein the substituted and/or inserted amino acids can be from any AAV serotype, and can include either naturally occurring or partially or completely synthetic amino acids.

[0481] In another embodiment, an rAAV vector useful in the treatment of Pompe Disease as disclosed herein is an AAV3bQ263Y capsid. In this particular embodiment, an AAV3bQ263Y capsid comprises a modification in the amino acid sequence of the two-fold axis loop of an AAV3b capsid via replacement of amino acid Q263 of the AAV3b capsid with Y263. In some embodiments, an AAV3b549A capsid comprises SEQ ID NO: 54. However, the modified virus capsids of the invention are not limited to AAV capsids set forth in SEQ ID NO: 54. In some embodiments, the amino acids from AAV3bQ263Y as set forth in SEQ ID NO: 54 can be, or are substituted with amino acids from a capsid from an AAV of a different serotype, wherein the substituted and/or inserted amino acids can be from any AAV serotype, and can include either naturally occurring or partially or completely synthetic amino acids.

[0482] In another embodiment, an rAAV vector useful in the treatment of Pompe Disease as disclosed herein is AAV3bSASTG serotype or comprises a AAV3bSASTG capsid. In this particular embodiment, an AAV3bSASTG capsid comprises a modification in the amino acid sequence to comprise a SASTG mutation, in particular, the AAV3b capsid was modified to resemble AAV2 Q263A/T265 subvariant by introducing these modifications at similar positions in the AAV3b capsid (as disclosed in Messina E L, et al., Adeno-associated viral vectors based on serotype 3b use components of the fibroblast growth factor receptor signaling complex for efficient transduction. Hum. Gene Ther. 2012 Oct.: 23(10):1031-4, Piacentino III, Valentino, et al. “X-linked inhibitor of apoptosis protein-mediated attenuation of apoptosis, using a novel cardiac-enhanced adeno-associated viral vector.” Human gene therapy 23.6 (2012): 635-646. which are both incorporated herein in their entirety by reference). Accordingly, in some embodiments, an rAAV vector useful in the treatment of Pompe Disease as disclosed herein is AAV3bSASTG serotype or comprises a AAV3bSASTG capsid comprising a AAV3b Q263A/T265 capsid. In some embodiments, the amino acids from AAV3bSASTG can be, or are substituted with amino acids from a capsid from an AAV of a different serotype, wherein the substituted and/or inserted amino acids can be from any AAV serotype, and can include either naturally occurring or partially or completely synthetic amino acids.

[0483] In order to facilitate their introduction into a cell, an rAAV vector genome useful in the invention are recombinant nucleic acid constructs that include (1) a heterologous sequence to be expressed (in one embodiment, a polynucleotide encoding a GAA polypeptide) and (2) viral sequence elements that facilitate integration and expression of the heterologous genes. The viral sequence elements may include those sequences of an AAV vector genome that are required in cis for replication and packaging (e.g., functional ITRs) of the DNA into an AAV capsid. In an embodiment, the heterologous gene encodes GAA, which is useful for correcting a GAA-deficiency in a patient suffering from Pompe Disease. In an embodiment, such an rAAV vector genome may also contain marker or reporter genes. In an embodiment, an rAAV vector genome can have one or more of the AAV3b wild-type (WT) cis genes replaced or deleted in whole or in part, but retain functional flanking ITR sequences.

[0484] In one embodiment, an rAAV vector as disclosed herein useful in the treatment of Pompe Disease comprises a rAAV genome as disclosed herein, encapsulated by an AAV3b capsid. In some embodiments, an rAAV vector as disclosed herein useful in the treatment of Pompe Disease comprises a rAAV genome as disclosed herein, encapsulated by any AAV3b capsid selected from: AAV3b capsid (SEQ ID NO: 44); AAV3b265D capsid (SEQ ID NO: 46), AAV3b ST (S663V+T492V) capsid (SEQ ID NO: 48), AAV3b265D549A capsid (SEQ ID NO: 50); AAV3b549A capsid (SEQ ID NO: 52); AAV3bQ263Y capsid (SEQ ID NO: 54), or a AAV3bSASTG (i.e., Q263A/T265) capsid.

[0485] In some embodiments of the methods and compositions as disclosed herein, the rAAV vector as disclosed herein comprises the nucleic acid sequences of any of: AAV_LVR412_EU (SEQ ID NO: 154), ssAAV_LVR412WT-hGAA_AskBio_CHATHAM (SEQ ID NO: 155), AAV-LVR412Stuffer (SEQ ID NO: 156), AAV_LVR422_EU (SEQ ID NO: 157), AAV-LVR422_Stuffer (SEQ ID NO: 158), ssAAV_LVR412_WT-hGAA CHATHAM (SEQ ID NO: 159), ssAAV_LSP_WT-hGAA-CHATHAM (SEQ ID NO: 160), or a nucleic acid sequence having at least 80%, 85%, 90%, 95% or 98% identity thereto. In some embodiments of the methods and compositions as disclosed herein, the rAAV vector that comprises a nucleic acid sequence of any of: SEQ ID NO: 154-160 can have the wtGAA sequence replaced by a modified GAA nucleic acid sequence as disclosed herein.

[0486] In some embodiments of the methods and compositions as disclosed herein, the rAAV vector as disclosed herein comprises the nucleic acid sequences of any of: SEQ ID NO: 57 (AAT-V43M-wtGAA (delta1-69aa)); SEQ ID NO: 58 (ratFN1-IGF2V43M-wtGAA (delta1-69aa)); SEQ ID NO: 59 (hFN1-IGF2V43M-wtGAA (delta1-69aa)); SEQ ID NO: 60 (AAT-IGF2-Δ2-7-wtGAA (delta 1-69)); SEQ ID NO: 61 (FN1rat-IGFΔ2-7-wtGAA (delta 1-69)); SEQ ID NO: 62 (hFN1-IGFΔ2-7-wtGAA (delta 1-69)), or a nucleic acid sequence having at least 80%, 85%, 90%, 95% or 98% identity thereto. In some embodiments of the methods and compositions as disclosed herein, the rAAV vector comprises a nucleic acid sequence of any of: AAT_hIGF2-V43M_wtGAA_del1-69_Stuffer.V02 (SEQ ID NO: 79); FIBrat_hIGF2-V43M_wtGAA_del1-69_Stuffer.V02 (SEQ ID NO: 80); FIBhum_hIGF2-V43M_wtGAA_del1-69_Stuffer.V02 (SEQ ID NO: 81); AAT_GILT_wtGAA_del1-69__Stuffer.V02 (SEQ ID NO: 82); FIBrat_GILT_wtGAA_del1-69_Stuffer.V02 (SEQ ID NO: 83); FIBhum_GILT_wtGAA_del1-69_Stuffer.V02 (SEQ ID NO: 84) or a nucleic acid sequence having at least 80%, 85%, 90%, 95% or 98% identity thereto.

[0487] In some embodiments of the methods and compositions as disclosed herein, the rAAV vector as disclosed herein comprises the nucleic acid sequences of any of: AAV_LVR412_EU (SEQ ID NO: 154), ssAAV_LVR412WT-hGAA_AskBio_CHATHAM (SEQ ID NO: 155), AAV-LVR412Stuffer (SEQ ID NO: 156), AAV_LVR422_EU (SEQ ID NO: 157), AAV-LVR422_Stuffer (SEQ ID NO: 158), ssAAV_LVR412_WT-hGAA CHATHAM (SEQ ID NO: 159), ssAAV_LSP_WT-hGAA-CHATHAM (SEQ ID NO: 160), or a nucleic acid sequence having at least 80%, 85%, 90%, 95% or 98% identity thereto. In some embodiments of the methods and compositions as disclosed herein, the rAAV vector that comprises a nucleic acid sequence of any of: SEQ ID NO: 154-160 can have the wtGAA sequence replaced by a modified GAA nucleic acid sequence as disclosed herein

### IV. Optimized rAAV Vector Genome

[0488] In some embodiments of the methods and compositions as disclosed herein, an optimized rAAV vector genome is created from any of the elements disclosed herein and in any combination, including nucleic acid sequences encoding a promoter, an ITR, a poly-A tail, elements capable of increasing or decreasing expression of a heterologous gene, and in one embodiment, a nucleic acid sequence that is codon optimized for expression of GAA protein in vivo (i.e., coGAA or codon optimized GAA) and optionally, one or more element to reduce immunogenicity. Such an optimized rAAV vector genome can be used with any AAV capsid that has tropism for the tissue and cells in which the rAAV vector genome is to be transduced and expressed.

[0489] In some embodiments, rAAV genome lacks the AAV P5 promoter, which is normally located upstream of the liver-specific promoter as disclosed herein. Normally, the P5 promoter controls expression of the AAV rep/cap proteins during AAV replication. In some embodiments, this P5 promoter fragment is present in the rAAV vector as disclosed herein which contains predicted transcription factor binding sites, e.g., cyclic AMP-responsive element-binding protein 3 (CREB3), which can be activated by endoplasmic reticulum (ER)/Golgi stress (Sampieri 2019), activating transcription factor 2 (ATF2), which is also involved in stress response (Watson 2017), Nuclear Receptor Subfamily 1 Group I Member 2 (NR1I2) (also known as Pregnane X receptor [PXR]) is known to be enriched in liver, and is activated by pregnane steroids, rifampin and other molecules including dexamethasone (NR1I2_HGNC) (Xing 2020). Accordingly, in some embodiments, a fragment of the AAV P5 promoter in the rAAV genome is removed without affecting the intended performance of the GAA cassette. In some embodiments, the rAAV vector also comprises a RNA polymerase II termination sequence located between the polyA signal and the 3′ ITR. An exemplary terminal sequence is SEQ ID NO: 439 which introduces two termination codons and one restriction site (e.g., XhoI) replaces TAG, and is located immediately downstream of the last coding amino acids of hGAA, and immediately located upstream of the 3′ UTR.

### AAV3b Capsid Modifications

[0490] In some embodiments of the methods and compositions as disclosed herein, an AAV3b capsid for use in a rAAV vector as disclosed herein, has an amino acid identity in the range of, e.g., about 75% to about 100%, about 80% to about 100%, about 85% to about 100%, about 90% to about 100%, about 95% to about 100%, about 75% to about 99%, about 80% to about 99%, about 85% to about 99%, about 90% to about 99%, about 95% to about 99%, about 75% to about 97%, about 80% to about 97%, about 85% to about 97%, about 90% to about 97%, or about 95% to about 97%, to any of AAV3b capsid (SEQ ID NO: 44); AAV3b265D capsid (SEQ ID NO: 46), AAV3b ST (S663V+T492V) capsid (SEQ ID NO: 48), AAV3b265D549A capsid (SEQ ID NO: 50); AAV3b549A capsid (SEQ ID NO: 52); AAV3bQ263Y capsid (SEQ ID NO: 54) or a AAV3bSASTG capsid (i.e., a AAV3b capsid comprising Q263A/T265 mutations) disclosed in Nienaber et al., Hum. Gen Ther, 2012, 23(10); 1031-42 and Piacentino III, Valentino, et al. “X-linked inhibitor of apoptosis protein-mediated attenuation of apoptosis, using a novel cardiac-enhanced adeno-associated viral vector.” Human gene therapy 23.6 (2012): 635-646, both of which are incorporated herein in their entirety by reference. In yet other aspects of this embodiment, an AAV derived from AAV3b has an amino acid identity in the range of, e.g., about 75% to about 100%, about 80% to about 100%, about 85% to about 100%, about 90% to about 100%, about 95% to about 100%, about 75% to about 99%, about 80% to about 99%, about 85% to about 99%, about 90% to about 99%, about 95% to about 99%, about 75% to about 97%, about 80% to about 97%, about 85% to about 97%, about 90% to about 97%, or about 95% to about 97%, to any of the amino acid sequence for AAV3b capsid (SEQ ID NO: 44); AAV3b265D capsid (SEQ ID NO: 46), AAV3b ST (S663V+T492V) capsid (SEQ ID NO: 48), AAV3b265D549A capsid (SEQ ID NO: 50); AAV3b549A capsid (SEQ ID NO: 52); AAV3bQ263Y capsid (SEQ ID NO: 54) a AAV3bSASTG capsid (i.e., a AAV3b capsid comprising Q263A/T265 mutations) as disclosed in Nienaber et al., Hum. Gen Ther, 2012, 23(10); 1031-42, and Piacentino III, Valentino, et al. “X-linked inhibitor of apoptosis protein-mediated attenuation of apoptosis, using a novel cardiac-enhanced adeno-associated viral vector.” Human gene therapy 23.6 (2012): 635-646. but the capsid still is a functionally active AAV protein.

[0491] In some embodiments of the methods and compositions as disclosed herein, the AAV serotype (e.g. AAV3b) comprises an SASTG mutation as described in Messina E L, et al., Adeno-associated viral vectors based on serotype 3b use components of the fibroblast growth factor receptor signaling complex for efficient transduction. Hum. Gene Ther. 2012 Oct.: 23(10):1031-42, which is incorporated herein in its entirety by reference.

[0492] In some embodiments of the methods and compositions as disclosed herein, an AAV3b capsid for use in a rAAV vector as disclosed herein, has, e.g., at least 1, 2, 3, 4, 5, 6, 7, 8, 9, 10, 15, 20, 25, 30, 35, 40, 45, or 50 contiguous amino acid deletions, additions, and/or substitutions relative to any of the amino acid sequence for AAV3b capsid (SEQ ID NO: 44); AAV3b265D capsid (SEQ ID NO: 46), AAV3b ST (S663V+T492V) capsid (SEQ ID NO: 48), AAV3b265D549A capsid (SEQ ID NO: 50); AAV3b549A capsid (SEQ ID NO: 52); AAV3bQ263Y capsid (SEQ ID NO: 54), or a AAV3bSASTG capsid (i.e., a AAV3b capsid comprising Q263A/T265 mutations) (as disclosed in Nienaber et al., Hum. Gen Ther, 2012, 23(10); 1031-42); or at most 1, 2, 3, 4, 5, 6, 7, 8, 9, 10, 15, 20, 25, 30, 35, 40, 45, or 50 contiguous amino acid deletions, additions, and/or substitutions relative to any of the amino acid sequence for AAV3b capsid (SEQ ID NO: 44); AAV3b265D capsid (SEQ ID NO: 46), AAV3b ST (S663V+T492V) capsid (SEQ ID NO: 48), AAV3b265D549A capsid (SEQ ID NO: 50); AAV3b549A capsid (SEQ ID NO: 52); AAV3bQ263Y capsid (SEQ ID NO: 54) a AAV3bSASTG capsid (i.e., a AAV3b capsid comprising Q263A/T265 mutations) (as disclosed in Nienaber et al., Hum. Gen Ther, 2012, 23(10); 1031-42). In yet another embodiment, an AAV3b capsid for use in a rAAV vector as disclosed herein, has, e.g., at least 1, 2, 3, 4, 5, 6, 7, 8, 9, 10, 15, 20, 25, 30, 35, 40, 45, or 50 contiguous amino acid deletions, additions, and/or substitutions relative to any of the amino acid sequence for AAV3b capsid (SEQ ID NO: 44); AAV3b265D capsid (SEQ ID NO: 46), AAV3b ST (S663V+T492V) capsid (SEQ ID NO: 48), AAV3b265D549A capsid (SEQ ID NO: 50); AAV3b549A capsid (SEQ ID NO: 52); AAV3bQ263Y capsid (SEQ ID NO: 54), or a AAV3bSASTG capsid (i.e., a AAV3b capsid comprising Q263A/T265 mutations) (as disclosed in Nienaber et al., Hum. Gen Ther, 2012, 23(10); 1031-42); or at most 1, 2, 3, 4, 5, 6, 7, 8, 9, 10, 15, 20, 25, 30, 35, 40, 45, or 50 contiguous amino acid deletions, additions, and/or substitutions relative to any of the amino acid sequence for AAV3b capsid (SEQ ID NO: 44); AAV3b265D capsid (SEQ ID NO: 46), AAV3b ST (S663V+T492V) capsid (SEQ ID NO: 48), AAV3b265D549A capsid (SEQ ID NO: 50); AAV3b549A capsid (SEQ ID NO: 52); AAV3bQ263Y capsid (SEQ ID NO: 54), or a AAV3bSASTG capsid (i.e., a AAV3b capsid comprising Q263A/T265 mutations) (as disclosed in Nienaber et al., Hum. Gen Ther, 2012, 23(10); 1031-42), but is still a functionally active AAV.

[0493] In some embodiments of the methods and compositions as disclosed herein, an AAV3b capsid for use in a rAAV vector as disclosed herein, has an amino acid identity in the range of, e.g., about 75% to about 100%, about 80% to about 100%, about 85% to about 100%, about 90% to about 100%, about 95% to about 100%, about 75% to about 99%, about 80% to about 99%, about 85% to about 99%, about 90% to about 99%, about 95% to about 99%, about 75% to about 97%, about 80% to about 97%, about 85% to about 97%, about 90% to about 97%, or about 95% to about 97%, to any of the amino acid sequence for AAV3b capsid (SEQ ID NO: 44); AAV3b265D capsid (SEQ ID NO: 46), AAV3b ST (S663V+T492V) capsid (SEQ ID NO: 48), AAV3b265D549A capsid (SEQ ID NO: 50); AAV3b549A capsid (SEQ ID NO: 52); AAV3bQ263Y capsid (SEQ ID NO: 54), a AAV3bSASTG capsid(i.e., a AAV3b capsid comprising Q263A/T265 mutations) (as disclosed in Nienaber et al., Hum. Gen Ther, 2012, 23(10); 1031-42). In yet a further embodiment, an AAV3b capsid for use in a rAAV vector as disclosed herein has an amino acid identity in the range of, e.g., about 75% to about 100%, about 80% to about 100%, about 85% to about 100%, about 90% to about 100%, about 95% to about 100%, about 75% to about 99%, about 80% to about 99%, about 85% to about 99%, about 90% to about 99%, about 95% to about 99%, about 75% to about 97%, about 80% to about 97%, about 85% to about 97%, about 90% to about 97%, or about 95% to about 97%, to any of the amino acid sequence for AAV3b capsid (SEQ ID NO: 44); AAV3b265D capsid (SEQ ID NO: 46), AAV3b ST (S663V+T492V) capsid (SEQ ID NO: 48), AAV3b265D549A capsid (SEQ ID NO: 50); AAV3b549A capsid (SEQ ID NO: 52); AAV3bQ263Y capsid (SEQ ID NO: 54), a AAV3bSASTG capsid (i.e., a AAV3b capsid comprising Q263A/T265 mutations) (as disclosed in Nienaber et al., Hum. Gen Ther, 2012, 23(10); 1031-42), but is still a functionally active AAV.

### V. Methods of Treatment

### A. Pompe Disease

[0494] The recombinant AAV expressing GAA protein as disclosed herein can be used in methods to treat Pompe disease and other glycogen storage diseases (GSD). Pompe disease is a rare genetic disorder caused by a deficiency in the enzyme acid alpha-glucosidase (GAA), which is needed to break down glycogen, a stored form of sugar used for energy. Pompe disease is also known as glycogen storage disease type II, GSD II, type II glycogen storage disease, glycogenosis type II, acid maltase deficiency, alpha-1,4-glucosidase deficiency, cardiomegalia glycogenic diffusa, and cardiac form of generalized glycogenosis. The build-up of glycogen causes progressive muscle weakness (myopathy) throughout the body and affects various body tissues, particularly in the heart, skeletal muscles, liver, respiratory and nervous system.

[0495] The presenting clinical manifestations of Pompe disease can vary widely depending on the age of disease onset and residual GAA activity. Residual GAA activity correlates with both the amount and tissue distribution of glycogen accumulation as well as the severity of the disease. Infantile-onset Pompe disease (less than 1% of normal GAA activity) is the most severe form and is characterized by hypotonia, generalized muscle weakness, and hypertrophic cardiomyopathy, and massive glycogen accumulation in cardiac and other muscle tissues. Death usually occurs within one year of birth due to cardiorespiratory failure. Juvenile-onset (1-10% of normal GAA activity) and adult-onset (10-40% of normal GAA activity) Pompe disease are more clinically heterogeneous, with greater variation in age of onset, clinical presentation, and disease progression. Juvenile- and adult-onset Pompe disease are generally characterized by lack of severe cardiac involvement, later age of onset, and slower disease progression, but eventual respiratory or limb muscle involvement results in significant morbidity and mortality. While life expectancy can vary, death generally occurs due to respiratory failure.

[0496] In any embodiment of the methods and compositions as disclosed herein, a GAA enzyme suitable for treating Pompe disease includes a wild-type human GAA, or a fragment or sequence variant thereof which retains the ability to cleave al-4 linkages in linear oligosaccharides. In some embodiments of the methods and compositions as disclosed herein, the GAA protein encoded by a wild type GAA nucleic acid sequence, e.g., SEQ ID NO: 11 or SEQ ID NO: 72. In some embodiments of the methods and compositions as disclosed herein, the GAA protein is encoded by a codon optimized GAA nucleic acid sequence, for example, for any one or more of: (1) enhanced expression in vivo, (2) to reduce CpG islands or (3) reduce the innate immune response. In some embodiments of the methods and compositions as disclosed herein, the GAA protein is encoded by a codon optimized GAA nucleic sequence, for example, any nucleic acid sequence selected from any of: SEQ ID NO: 73, SEQ ID NO: 74, SEQ ID NO: 75 and SEQ ID NO: 76 or SEQ ID NO: 182, or a nucleic acid sequence having at least 60%, or 70%, or 80%, 85% or 90% or 95%, or 98%, or 99% sequence identity to SEQ ID NO: 73, SEQ ID NO: 74, SEQ ID NO: 75, SEQ ID NO: 76 or SEQ ID NO: 182.

[0497] In some embodiments of the methods and compositions as disclosed herein, a rAAV vector as described herein transduces the liver of a subject and secretes the hGAA polypeptide into the blood, which perfuses patient tissues where the hGAA polypeptide, with the assistance of the fused IGF2-sequence, is taken up by cells and transported to the lysosome, where the enzyme acts to eliminate material that has accumulated in the lysosomes due to the enzyme deficiency. For lysosomal enzyme replacement therapy to be effective, the therapeutic enzyme must be delivered to lysosomes in the appropriate cells in tissues where the storage defect is manifest.

### B. Modulating GAA Levels in a Cell Ex Vivo

[0498] The nucleic acids, vector, and virions as described herein can be used to modulate levels of GAA in a cell. The method includes the step of administering to the cell a composition including a nucleic acid that includes a polynucleotide encoding GAA interposed between two AAV ITRs. The cell can be from any animal into which a nucleic acid of the invention can be administered. Mammalian cells (e.g., humans, dogs, cats, pigs, sheep, mice, rats, rabbits, cattle, goats, etc.) from a subject with GAA deficiency are typical target cells for use in the invention. In some embodiments, the cell is a liver cell or a myocardial cell e.g., a myocardiocyte.

[0499] In an embodiment ex vivo delivery of cells transduced with rAAV vector is disclosed herein. In a further embodiment, ex vivo gene delivery may be used to transplant cells transduced with a rAAV vector as disclosed herein back into the host. In a further embodiment, ex vivo stem cell (e.g., mesenchymal stem cell) therapy may be used to transplant cells transduced with a rAAV vector as disclosed herein cells back into the host. In another embodiment, a suitable ex vivo protocol may include several steps.

[0500] In some embodiments, a segment of target tissue (e.g., muscle, liver tissue) may be harvested from the subject, and the rAAV vector described herein used to transduce a GAA-encoding nucleic acid into a host's cells. These genetically modified cells may then be transplanted back into the host. Several approaches may be used for the reintroduction of cells into the host, including intravenous injection, intraperitoneal injection, subcutaneous injection, or in situ injection into target tissue. Microencapsulation of modified ex vivo cells transduced or infected with an rAAV vector as described herein is another technique that may be used within the invention. Autologous and allogeneic cell transplantation may be used according to the invention.

[0501] In yet another embodiment, disclosed herein is a method of treating a deficiency of GAA in a subject, comprising administering to the subject a cell expressing GAA as disclosed herein, in a pharmaceutically acceptable carrier and in a therapeutically effective amount. In some embodiments, the subject is a human.

### C. Increasing GAA Activity in a Subject

[0502] The nucleic acids, vectors, and virions as described herein can be used to modulate levels of functional GAA polypeptide in a subject, e.g., a human subject, or subject with Pompe disease or at risk of having Pompe disease. The method includes administering to the subject a composition comprising the rAAV vector, comprising the rAAV genome as described herein, comprising a heterologous nucleic acid encoding GAA interposed between two AAV ITRs, where the hGAA is linked to a signal peptide as described herein, and optionally a IGF2 targeting peptide as disclosed herein. The subject can be any animal, e.g., mammals (e.g., human beings, dogs, cats, pigs, sheep, mice, rats, rabbits, cattle, goats, etc.) are suitable subjects. The methods and compositions of the invention are particularly applicable to GAA-deficient human subjects.

[0503] Furthermore, the nucleic acids, vectors, and virions described herein may be administered to animals including human beings in any suitable formulation by any suitable method. For example, in any embodiment of the methods and compositions as disclosed herein, an rAAV vector, or rAAV genome as disclosed herein can be directly introduced into an animal, including through administration by oral, rectal, transmucosal, intranasal, inhalation (e.g., via an aerosol), buccal (e.g., sublingual), vaginal, intrathecal, intraocular, transdermal, in utero (or in ovo), parenteral (e.g., intravenous, subcutaneous, intradermal, intramuscular [including administration to skeletal, diaphragm and/or cardiac muscle], intradermal, intrapleural, intracerebral, and intraarticular), topical (e.g., to both skin and mucosal surfaces, including airway surfaces, and transdermal administration), intralymphatic, and the like, as well as direct tissue or organ injection (e.g., to liver, skeletal muscle, cardiac muscle, diaphragm muscle or brain) or other parenteral route depending on the desired route of administration and the tissue that is being targeted.

[0504] In some embodiments, as the an rAAV vector, or rAAV genome comprises a nucleic acid sequence encoding GAA under the control of, or operatively linked to a liver specific promoter, the methods and compositions as disclosed herein can be administered via intravenous or intramuscular injection, where the rAAV vector, or rAAV genome will travel to the liver and express the GAA protein.

[0505] In any embodiment of the methods and compositions as disclosed herein, administration to a muscle can be by any suitable method including intravenous administration, intra-arterial administration, and/or intra-peritoneal administration. Exemplary modes of administration include oral, rectal, transmucosal, intranasal, inhalation (e.g., via an aerosol), buccal (e.g., sublingual), vaginal, intrathecal, intraocular, transdermal, in utero (or in ovo), parenteral (e.g., intravenous, subcutaneous, intradermal, intramuscular [including administration to skeletal, diaphragm and/or cardiac muscle], intradermal, intrapleural, intracerebral, and intraarticular), topical (e.g., to both skin and mucosal surfaces, including airway surfaces, and transdermal administration), intralymphatic, and the like, as well as direct tissue or organ injection (e.g., to liver, skeletal muscle, cardiac muscle, diaphragm muscle or brain). The most suitable route in any given case will depend on the nature and severity of the condition being treated and/or prevented and on the nature of the particular vector that is being used.

[0506] In any embodiment of the methods and compositions as disclosed herein, administration to skeletal muscle according to the present invention includes but is not limited to administration to skeletal muscle in the limbs (e.g., upper arm, lower arm, upper leg, and/or lower leg), back, neck, head (e.g., tongue), thorax, abdomen, pelvis/perineum, and/or digits. Suitable skeletal muscles that can be injected are disclosed in U.S. provisional application 62,937,556, filed on Nov. 19, 2019, which is incorporated herein its entirety by reference.

[0507] In any embodiment of the methods and compositions as disclosed herein, the rAAV vectors and/or rAAV genome as disclosed herein are administered to the skeletal muscle, liver, diaphragm, costal, and/or cardiac muscle cells of a subject. For example, a conventional syringe and needle can be used to inject a rAAV virion suspension into an animal. Parenteral administration of a the rAAV vectors and/or rAAV genome, by injection can be performed, for example, by bolus injection or continuous infusion. Formulations for injection may be presented in unit dosage form, for example, in ampoules or in multi-dose containers, with an added preservative. The compositions may take such forms as suspensions, solutions or emulsions in oily or aqueous vehicles, and may contain agents for a pharmaceutical formulation, such as suspending, stabilizing and/or dispersing agents. Alternatively, the rAAV vectors and/or rAAV genome as disclosed herein can be in powder form (e.g., lyophilized) for constitution with a suitable vehicle, for example, sterile pyrogen-free water, before use.

[0508] In particular embodiments, more than one administration (e.g., two, three, four, five, six, seven, eight, nine, 10, etc., or more administrations) may be employed to achieve the desired level of gene expression over a period of various intervals, e.g., hourly, daily, weekly, monthly, yearly, etc. Dosing can be single dosage or cumulative (serial dosing), and can be readily determined by one skilled in the art. For instance, treatment of a disease or disorder may comprise a one-time administration of an effective dose of a pharmaceutical composition virus vector disclosed herein. Alternatively, treatment of a disease or disorder may comprise multiple administrations of an effective dose of a virus vector carried out over a range of time periods, such as, e.g., once daily, twice daily, trice daily, once every few days, or once weekly.

[0509] The timing of administration can vary from individual to individual, depending upon such factors as the severity of an individual's symptoms. For example, an effective dose of a virus vector disclosed herein can be administered to an individual once every six months for an indefinite period of time, or until the individual no longer requires therapy. A person of ordinary skill in the art will recognize that the condition of the individual can be monitored throughout the course of treatment and that the effective amount of a virus vector disclosed herein that is administered can be adjusted accordingly.

[0510] Injectables can be prepared in conventional forms, either as liquid solutions or suspensions, solid forms suitable for solution or suspension in liquid prior to injection, or as emulsions. Alternatively, one may administer the virus vector and/or virus capsids of the invention in a local rather than systemic manner, for example, in a depot or sustained-release formulation. Further, the virus vector and/or virus capsid can be delivered adhered to a surgically implantable matrix (e.g., as described in U.S. Patent Publication No. US-2004-0013645-A1). The virus vectors and/or virus capsids disclosed herein can be administered to the lungs of a subject by any suitable means, optionally by administering an aerosol suspension of respirable particles comprised of the virus vectors and/or virus capsids, which the subject inhales. The respirable particles can be liquid or solid. Aerosols of liquid particles comprising the virus vectors and/or virus capsids may be produced by any suitable means, such as with a pressure-driven aerosol nebulizer or an ultrasonic nebulizer, as is known to those of skill in the art. See, e.g., U.S. Pat. No. 4,501,729. Aerosols of solid particles comprising the virus vectors and/or capsids may likewise be produced with any solid particulate medicament aerosol generator, by techniques known in the pharmaceutical art.

[0511] In some embodiments, the rAAV vectors and/or rAAV genome as disclosed herein can be formulated in a solvent, emulsion or other diluent in an amount sufficient to dissolve an rAAV vector disclosed herein. In other aspects of this embodiment, the rAAV vectors and/or rAAV genome as disclosed herein can herein may be formulated in a solvent, emulsion or a diluent in an amount of, e.g., less than about 90% (v/v), less than about 80% (v/v), less than about 70% (v/v), less than about 65% (v/v), less than about 60% (v/v), less than about 55% (v/v), less than about 50% (v/v), less than about 45% (v/v), less than about 40% (v/v), less than about 35% (v/v), less than about 30% (v/v), less than about 25% (v/v), less than about 20% (v/v), less than about 15% (v/v), less than about 10% (v/v), less than about 5% (v/v), or less than about 1% (v/v). In other aspects, the rAAV vectors and/or rAAV genome as disclosed herein can disclosed herein may comprise a solvent, emulsion or other diluent in an amount in a range of, e.g., about 1% (v/v) to 90% (v/v), about 1% (v/v) to 70% (v/v), about 1% (v/v) to 60% (v/v), about 1% (v/v) to 50% (v/v), about 1% (v/v) to 40% (v/v), about 1% (v/v) to 30% (v/v), about 1% (v/v) to 20% (v/v), about 1% (v/v) to 10% (v/v), about 2% (v/v) to 50% (v/v), about 2% (v/v) to 40% (v/v), about 2% (v/v) to 30% (v/v), about 2% (v/v) to 20% (v/v), about 2% (v/v) to 10% (v/v), about 4% (v/v) to 50% (v/v), about 4% (v/v) to 40% (v/v), about 4% (v/v) to 30% (v/v), about 4% (v/v) to 20% (v/v), about 4% (v/v) to 10% (v/v), about 6% (v/v) to 50% (v/v), about 6% (v/v) to 40% (v/v), about 6% (v/v) to 30% (v/v), about 6% (v/v) to 20% (v/v), about 6% (v/v) to 10% (v/v), about 8% (v/v) to 50% (v/v), about 8% (v/v) to 40% (v/v), about 8% (v/v) to 30% (v/v), about 8% (v/v) to 20% (v/v), about 8% (v/v) to 15% (v/v), or about 8% (v/v) to 12% (v/v).

[0512] In any embodiment of the methods and compositions as disclosed herein, the rAAV vectors and/or rAAV genome as disclosed herein, of any serotype, including but not limited to encapsulated by any AAV3b capsid selected from: AAV3b capsid (SEQ ID NO: 44); AAV3b265D capsid (SEQ ID NO: 46), AAV3b ST (S663V+T492V) capsid (SEQ ID NO: 48), AAV3b265D549A capsid (SEQ ID NO: 50); AAV3b549A capsid (SEQ ID NO: 52); AAV3bQ263Y capsid (SEQ ID NO: 54) or AAV3bSASTG capsid (i.e., a AAV3b capsid comprising Q263A/T265 mutations) can comprise a therapeutic compound in a therapeutically effective amount. In an embodiment, as used herein, without limitation, the term “effective amount” is synonymous with “therapeutically effective amount”, “effective dose”, or “therapeutically effective dose.” In an embodiment, the effectiveness of a therapeutic compound disclosed herein to treat Pompe Disease can be determined, without limitation, by observing an improvement in an individual based upon one or more clinical symptoms, and/or physiological indicators associated with Pompe Disease. In an embodiment, an improvement in the symptoms associated with Pompe Disease can be indicated by a reduced need for a concurrent therapy.

[0513] To facilitate delivery of a rAAV vector and/or rAAV genome as disclosed herein, it can be mixed with a carrier or excipient. Carriers and excipients that might be used include saline (especially sterilized, pyrogen-free saline) saline buffers (for example, citrate buffer, phosphate buffer, acetate buffer, and bicarbonate buffer), amino acids, urea, alcohols, ascorbic acid, phospholipids, proteins (for example, serum albumin), EDTA, sodium chloride, liposomes, mannitol, sorbitol, and glycerol. USP grade carriers and excipients are particularly useful for delivery of virions to human subjects.

[0514] In addition to the formulations described previously, a rAAV vector and/or rAAV genome as disclosed herein can also be formulated as a depot preparation. Such long acting formulations may be administered by implantation (for example subcutaneously or intramuscularly) or by IM injection. Thus, for example, a rAAV vector and/or rAAV genome as disclosed herein may be formulated with suitable polymeric or hydrophobic materials (for example as an emulsion in an acceptable oil) or ion exchange resins, or as sparingly soluble derivatives.

[0515] In any embodiment of the methods and compositions as disclosed herein, the method is directed to treating Pompe Disease that results from a deficiency of GAA in a subject, wherein a rAAV vector and/or rAAV genome as disclosed herein is administered to a patient suffering from Pompe Disease, and following administration, GAA is secreted from cells in the liver and there is uptake of the secreted GAA by cells in skeletal muscle tissue, cardiac muscle tissue, diaphragm muscle tissue or a combination thereof, wherein uptake of the secreted GAA results in a reduction in lysosomal glycogen stores in the tissue(s). In some embodiments, the rAAV vector and/or rAAV genome as disclosed herein is encapsulated in a capsid, e.g., encapsulated by any AAV3b capsid selected from: AAV3b capsid (SEQ ID NO: 44); AAV3b265D capsid (SEQ ID NO: 46), AAV3b ST (S663V+T492V) capsid (SEQ ID NO: 48), AAV3b265D549A capsid (SEQ ID NO: 50); AAV3b549A capsid (SEQ ID NO: 52); AAV3bQ263Y capsid (SEQ ID NO: 54).

[0516] In a particular embodiment, at least about 10² to about 108 cells or at least about 103 to about 10⁶ cells will be administered per dose in a pharmaceutically acceptable carrier. In a further embodiment, dosages of the virus vector and/or capsid to be administered to a subject depend upon the mode of administration, the disease or condition to be treated and/or prevented, the individual subject's condition, the particular virus vector or capsid, the nucleic acid to be delivered, and the like, and can be determined in a routine manner. Exemplary doses for achieving therapeutic effects are titers of at least about 10⁵, 10⁶, 10⁷, 10⁸, 10⁹, 10¹⁰, 10¹¹, 10¹², 10¹³, 10¹⁴, 10¹⁵ transducing units, optionally about 10⁸-10¹³ transducing units.

[0517] In another aspect, disclosed herein is a method of administering a nucleic acid encoding a GAA to a cell, comprising contacting the cell with a rAAV vector and/or rAAV genome as disclosed herein, under conditions for the nucleic acid to be introduced into the cell and expressed to produce GAA. In some embodiments, the cell is a cultured cell. In some embodiments, the cell is a cell in vivo. In some embodiments, the cell is a mammalian cell. In some embodiments, method of administering a nucleic acid encoding a GAA to a cell further comprises collecting the GAA secreted into a cell culture medium.

### D. Increasing Motoneuron Function in a Mammal

[0518] In any embodiment of the methods and compositions as disclosed herein, a rAAV vector and/or rAAV genome as disclosed herein is useful in compositions and methods to increase phrenic nerve activity in a mammal having Pompe disease and/or insufficient GAA levels. For example, a rAAV vector and/or rAAV genome as disclosed herein, e.g., a rAAV vector and/or rAAV genome encapsulated in a capsid, e.g., encapsulated by any AAV3b capsid selected from: AAV3b capsid (SEQ ID NO: 44); AAV3b265D capsid (SEQ ID NO: 46), AAV3b ST (S663V+T492V) capsid (SEQ ID NO: 48), AAV3b265D549A capsid (SEQ ID NO: 50); AAV3b549A capsid (SEQ ID NO: 52); AAV3bQ263Y capsid (SEQ ID NO: 54), can be administered to the central nervous system (e.g., neurons). In another embodiment, retrograde transport of rAAV vector and/or rAAV genome as disclosed herein encoding GAA from the diaphragm (or other muscle) to the phrenic nerve or other motor neurons can result in biochemical and physiological correction of Pompe disease. These same principles could be applied to other neurodegenerative disease.

[0519] In an embodiment, a rAAV GAA construct of any serotype as described in Table 1, including AAV8 or AAV3, or AAV3b (including but not limited to AAV3b serotypes AAV3b265D, AAV3b265D549A, AAV3b549A, AAV3bQ263Y, AAV3bSASTG (i.e., a AAV3b capsid comprising Q263A/T265 mutations) serotypes) is capable of reducing any one or more of the symptoms of (i) the feeling of weakness in a patient's lower extremities, including, the legs, trunk and/or arms, (ii) a shortness of breath, a hard time exercising, lung infections, a big curve in the spine, trouble breathing while sleeping, an enlarged liver, an enlarged tongue and/or a stiff joint, (iii) in a patient suffering from Pompe Disease by, e.g., at least 10%, at least 15%, at least 20%, at least 25%, at least 30%, at least 35%, at least 40%, at least 45%, at least 50%, at least 55%, at least 60%, at least 65%, at least 70%, at least 75%, at least 80%, at least 85%, at least 90% or at least 95% as compared to a patient not receiving the same treatment. In other aspects of this embodiment, an AAV GAA of any serotype is capable of reducing any one or more of the systems of (i) the feeling of weakness in a patient's lower extremities, including, the legs, trunk and/or arms, ii) a shortness of breath, a hard time exercising, lung infections, a big curve in the spine, trouble breathing while sleeping, an enlarged liver, an enlarged tongue and/or a stiff joint, (iii) in a patient suffering from Pompe Disease by, e.g., about 10% to about 100%, about 20% to about 100%, about 30% to about 100%, about 40% to about 100%, about 50% to about 100%, about 60% to about 100%, about 70% to about 100%, about 80% to about 100%, about 10% to about 90%, about 20% to about 90%, about 30% to about 90%, about 40% to about 90%, about 50% to about 90%, about 60% to about 90%, about 70% to about 90%, about 10% to about 80%, about 20% to about 80%, about 30% to about 80%, about 40% to about 80%, about 50% to about 80%, or about 60% to about 80%, about 10% to about 70%, about 20% to about 70%, about 30% to about 70%, about 40% to about 70%, or about 50% to about 70% as compared to a patient not receiving the same treatment.

[0520] In any embodiment of the methods and compositions as disclosed herein, at least one symptom associated with Pompe Disease, or at least one adverse side effect associated with Pompe Disease are reduced by at least 10%, at least 15%, at least 20%, at least 25%, at least 30%, at least 35%, at least 40%, at least 45%, at least 50%, at least 55%, at least 60%, at least 65%, at least 70%, at least 75%, at least 80%, at least 85%, at least 90%, or at least 95%, and the severity of at least one symptom associated with Pompe Disease, or at least one adverse side effect is reduced by at least 10%, at least 15%, at least 20%, at least 25%, at least 30%, at least 35%, at least 40%, at least 45%, at least 50%, at least 55%, at least 60%, at least 65%, at least 70%, at least 75%, at least 80%, at least 85%, at least 90%, or at least 95%. In another embodiment, at least one symptom associated with Pompe Disease, or at least one adverse side effect associated with Pompe Disease is reduced by about 10% to about 100%, about 20% to about 100%, about 30% to about 100%, about 40% to about 100%, about 50% to about 100%, about 60% to about 100%, about 70% to about 100%, about 80% to about 100%, about 10% to about 90%, about 20% to about 90%, about 30% to about 90%, about 40% to about 90%, about 50% to about 90%, about 60% to about 90%, about 70% to about 90%, about 10% to about 80%, about 20% to about 80%, about 30% to about 80%, about 40% to about 80%, about 50% to about 80%, or about 60% to about 80%, about 10% to about 70%, about 20% to about 70%, about 30% to about 70%, about 40% to about 70%, or about 50% to about 70%.

[0521] E. Immunosuppression

[0522] In any embodiment of the methods and compositions as disclosed herein, a subject being administered a rAAV vector or rAAV genome as disclosed herein is also administered an immunosuppressive agent. Various methods are known to result in the immunosuppression of an immune response of a patient being administered AAV. Methods known in the art include administering to the patient an immunosuppressive agent, such as a proteasome inhibitor. One such proteasome inhibitor known in the art, for instance as disclosed in U.S. Pat. No. 9,169,492 and U.S. patent application Ser. No. 15/796,137, both of which are incorporated herein by reference, is bortezomib. In another embodiment, an immunosuppressive agent can be an antibody, including polyclonal, monoclonal, scfv or other antibody derived molecule that is capable of suppressing the immune response, for instance, through the elimination or suppression of antibody producing cells. In a further embodiment, the immunosuppressive element can be a short hairpin RNA (shRNA). In such an embodiment, the coding region of the shRNA is included in the rAAV cassette and is generally located downstream, 3′ of the poly-A tail. The shRNA can be targeted to reduce or eliminate expression of immunostimulatory agents, such as cytokines, growth factors (including transforming growth factors β1 and β2, TNF and others that are publicly known).

[0523] VI. Replacing GAA with other lysosomal enzymes.

[0524] In some embodiments, in any of the methods and compositions as disclosed herein, the nucleic acid sequence encoding a GAA polypeptide can be substituted for the nucleic acid sequence of a lysosomal enzyme. A lysosomal enzyme suitable to be expressed by the rAAV vectors or rAAV genomes as disclosed herein includes any enzyme that is capable of reducing accumulated materials in mammalian lysosomes or that can rescue or ameliorate one or more lysosomal storage disease symptoms. Suitable lysosomal enzymes include both wild-type or modified lysosomal enzymes and can be produced using recombinant or synthetic methods or purified from nature sources. Exemplary lysosomal enzymes are listed in Table 5A or Table 6A.

TABLE 5A
Exemplary Lysosomal Storage Diseases (LSD) and associated enzyme defects

| | | |
|---|---|---|
| Disease | Enzyme defect | Substance stored |

A. Glycogenosis Disorders

| | | |
|---|---|---|
| Pompe Disease | Acid-a1,4-Glucosidase | Glycogen α1-4 linked |
| | | Oligosaccharides |

B. Glycolipidosis Disorders

| | | |
|---|---|---|
| GM1 Gangliodsidosis | β-Galactosidase | GM₁ Gangliosides |
| Tay-Sachs Disease | β-Hexosaminidase A | GM₂ Ganglioside |
| AB Variant | Protein | |
| Sandhoff Disease | β-Hexosaminidase A & B | GM₂ Ganglioside |
| Fabry Disease | α-Galactosidase A | Globosides |
| Gaucher Disease | Glucocerebrosidase | Glucosylcerami |
| Metachromatic | Arylsulfatase A | Sulphatides |
| Leukodystrophy | | |
| Krabbe Disease | Galactosylceramidase | Galactocerebroside |
| Niemann-Pick, Types A & B | Acid Sphingomyelinase | Sphingomyelin |
| Niemann-Pick, Type D | Unknown | Sphingomyelin |
| Farber Disease | Acid Ceramidase | Ceramide |
| Wolman Disease | Acid Lipase | Cholesteryl Esters |

C. Mucopolysaccharide disorders

| | | |
|---|---|---|
| Hurler Syndrome (MPS IH) | α-L-Iduronidase | Heparan & Dermatan Sulfates |
| Scheie Syndrome (MPS IS) | α-L-Iduronidase | Heparan & Dermatan Sulfates |
| Hurler-Scheie (MPS IH/S) | α-L-Iduronidase | Heparan & Dermatan Sulfates |
| Hunter Syndrome (MPS II) | Iduronate Sulfatase | Heparan & Dermatan Sulfates |
| Sanfilippo A (MPS IIIA) | Heparan N-Sulfatase | Heparan Sulfate |
| Sanfilippo B (MPS IIIB) | α-N-Acetylglucosaminidase | Heparan Sulfate |
| Sanfilippo C (MPS IIIC) | Acetyl-CoA-Glucosaminide | Heparan Sulfate |
| | Acetyltransferase | |
| Sanfilippo D (MPS IIID) | N-Acetylglucosamine- | Heparan Sulfate |
| | 6-Sulfatase | |
| Morquio A (MPS IVA) | Galactosamine-6-Sulfatase | Keratan Sulfate |
| Morquio B (MPS IVB) | β-Galactosidase | Keratan Sulfate |
| Maroteaux-Lamy (MPS VI) | Arylsulfatase B | Dermatan Sulfate |
| Sly Syndrome (MPS VII) | β-Glucuronidase | |

D. Oligosaccharide/Glycoprotein Disorders

| | | |
|---|---|---|
| α-Mannosidosis | α-Mannosidosis | Mannose/Oligosacharides |
| β-Mannosidosis | β-Mannosidosis | Mannose/Oligosacharides |
| Fucosidosis | α-L-Fucosidase | Fucosyl Oligosaccharides |
| Aspartylglucosaminuria | N-Aspartyl-3- | Aspartylglucosamine |
| | Glucosaminidase | Asparagines |
| Sialidosis (Mucolipidosis 1) | α-Neuraminidase | Sialyloligosaccharides |
| Galactosialidosis | Lysosomal Protective Protein | Sialyloligosaccharides |
| (Goldberg Syndrome) | Deficiency | |
| Schindler Disease | α-N-Acetyl- | |
| | Galactosaminidase | |

E. Lysosomal Enzyme Transport Disorders

| | | |
|---|---|---|
| Mucolipidosis II | N-Acetylglucosamine-1- | Heparan Sulfate |
| (I-Cell Disease) | Phosphotransferase | |
| Mucolipidosis III (Pseudo- | Same as MLII | |
| Hurler Polydystrophy) | | |

F. Lysosomal Membrane Transport Disorders

| | | |
|---|---|---|
| Cystinosis | Cystine Transport Protein | Free Cystine |
| Salla Disease | Sialic Acid Transport Protein | Free Sialic Acid and |
| | | Glucuronic Acid |
| Infantile Sialic Acid | Sialic Acid Transport Protein | Free Sialic Acid and |
| Storage Disease | | Glucuronic Acid |

G. Other

| | | |
|---|---|---|
| Batten Disease (Juvenile | Unknown | Lipofuscins |
| Neuronal Ceroid | | |
| Lipofuscinosis) | | |
| Infantile Neuronal | Palmitoyl-Protein | Lipofuscins |
| Ceroid Lipofuscinosis | Thioesterase | |
| Mucolipidosis IV | Unknown | Gangliosides & |
| | | Hyaluronic Acid |
| Prosaposin | Saposins A, B, C or D | |

[0525] In some embodiments of the composition and methods disclosed herein, one particularly preferred lysosomal enzyme is glucocerebrosidase, which is currently recombinantly produced and manufactured by Genzyme and used in enzyme replacement therapy for Gaucher's Disease. Currently, the recombinant enzyme is prepared with exposed mannose residues, which targets the protein specifically to cells of the macrophage lineage. Although the primary pathology in type 1 Gaucher patients are due to macrophage accumulating glucocerebroside, there can be therapeutic advantage to delivering glucocerebrosidase to other cell types. Targeting glucocerebrosidase to lysosomes using the present invention would target the agent to multiple cell types and can have a therapeutic advantage compared to other preparations. In some embodiments of the composition and methods disclosed herein, the lysosomal disease treated in the methods disclosed herein is not Pompe. In some embodiments of the composition and methods disclosed herein, the lysosomal enzyme encoded by the nucleic acid in the targeting vector or rAAV vector is not GAA.

[0526] While methods and compositions of the invention are useful for producing and delivering any therapeutic agent to a subcellular compartment, the invention is particularly useful for delivering gene products for treating metabolic diseases.

[0527] In some embodiments, a lysosomal enzyme for treating lysosomal storage diseases (LSD) are shown in Table 5A. In some embodiments, the lysosomal enzyme is associated with Golgi or ER defects, which are shown in Table 6A. In a preferred embodiment, a viral vector encoding a lysosomal enzyme as described herein is delivered to a patient suffering from a defect in the same lysosomal enzyme gene. In alternative embodiments, a functional sequence or species variant of the lysosomal enzyme gene is used. In further embodiments, a gene coding for a different enzyme that can rescue a lysosomal enzyme gene defect is according to methods of the invention.

TABLE 6A
Diseases of the Golgi and ER
Diseases of the Golgi and ER

| | Gene and | |
|---|---|---|
| Disease Name | Enzyme Defect | Features |
| Ehlers-Danlos | PLOD1 lysyl | Defect in lysyl hydroxylation |
| Syndrome | hydroxylase | of Collagen; located in |
| Type VI | | ER lumen |
| Type Ia glycogen | glucose6 phosphatase | Causes excessive |
| storage disease | | accumulation of Glycogen |
| | | in the liver, kidney, and |
| | | Intestinal mucosa; enzyme |
| | | is transmembrane but |
| | | active site is ER lumen |

Congenital Disorders of Glycosylation

| | | |
|---|---|---|
| CDG Ic | ALG6 | Defects in N-glycosylation |
| | α1,3 | ER lumen |
| | glucosyltransferase | |
| CDG Id | ALG3 | Defects in N-glycosylation |
| | α1,3 | ER transmembrane protein |
| | mannosyltransferase | |
| CDG IIa | MGAT2 | Defects in N-glycosylation |
| | N-acetylglucosaminyl- | golgi transmembrane protein |
| | transferase II | |
| CDG IIb | GCS1 | Defect in N glycosylation |
| | α1,2-Glucosidase I | ER membrane bound with |
| | | lumenal catalytic domain |
| | | releasable by proteolysis |

[0528] In some embodiments of the methods and compositions as disclosed herein, a targeting vector or rAAV expresses a protein of any of the sequences in Table 5B or in Table 6B.

TABLE 5B
Exemplary Lysosomal Storage Diseases (LSD) and proteins to be expressed by
targeting vectors or rAAV vectors, and nucleic acid sequences encoding the proteins.

| | | | |
|---|---|---|---|
| | | Nucleic acid | |
| | | sequence for | |
| | | expression by a | Protein sequence |
| | | targeting vector | encoding the |
| Disease | Enzyme defect | or rAAV | enzyme defect |

A. Glycogenosis Disorders

| | | | |
|---|---|---|---|
| Pompe Disease | Acid-a1,4-Glucosidase | SEQ ID NO: 11 >> wt | SEQ ID NO: 10 (aa |
| | (GAA)(WT) | full length hGAA | wt full length hGAA |
| | | (non-codon | aa (non-codon |
| | | optimized); | optimized); |
| | | NP_000143.2 | NM_000152.4), |
| | | | or SEQ ID |
| | | | Nos 170, 171, 172, |
| | | | 173, 174 |
| | Acid-a1,4-Glucosidase | SEQ ID NO: 72 or | |
| | (hGAA) | SEQ ID NO: 182 >>> | |
| | | hGAA | |
| | Acid-a1,4-Glucosidase | SEQ ID NO: 73 > | |
| | (hGAA 3X) | hGAA 3X | |
| | hGAA | SEQ ID NO: 74 > | |
| | hGAA_Codon_ | hGAA_Codon_ | |
| | Optimized_No1 > | Optimized_No1 | |
| | hGAA_Codon_ | SEQ ID NO: 75 > | |
| | Optimized_No2 | hGAA_Codon_ | |
| | | Optimized_No2 | |
| | >hGAA_Codon_ | SEQ ID NO: 76 > | |
| | Optimized_No3 | hGAA_Codon_ | |
| | | Optimized_No3 | |

B. Glycolipidosis Disorders

| | | | |
|---|---|---|---|
| GM1 Gangliodsidosis | β-Galactosidase (GLB1) | SEQ ID NO: 227 | SEQ ID NO: 185 |
| (GLB1 deficiency) | | GLB1 | NP_000395.3 |
| | | (NM 000404.4) | |
| Tay-Sachs Disease | β-Hexosaminidase A | SEQ ID NO: 228 | SEQ ID NO: 186 |
| | (HEXA) | NM_000520.6 | NP_000511.2 |
| | | (HEXA) | (HEXA) |
| GM2-gangliosidosis, AB | β-Hexosaminidase A | SEQ ID NO: 229 | SEQ ID NO: 186 |
| variant | (HEXA) and HEXB | NM_000520.6 | NP_000511.2 |
| | | (HEXA) | (HEXA) |
| Sandhoff Disease | β-Hexosaminidase A & | SEQ ID NO:229; | SEQ ID NO: 186 |
| | β-Hexosaminidase B | NM_000520.6 | NP 000511.2 |
| | (HEXA and HEXB) | (HEXA) | (HEXA) |
| | | SEQ ID NO: 230; | SEQ ID NO: 187; |
| | | NM_000521.4 | NP_000512.2 |
| | | (HEXB) | (HEXB) |
| Fabry Disease | α-Galactosidase A | SEQ ID NO: 231 | SEQ ID NO: 188; |
| | (GLA) | NM_000169.3 (GLA) | NP_000160.1 |
| | | | (GLA) |
| Gaucher Disease | Glucocerebrosidase | SEQ ID NO: 232 | SEQ ID NO: 189; |
| | (GBA) | NM_000157.4 (GBA) | NP_000148.2 |
| | | | (GBA) |
| Metachromatic | Arylsulfatase A (ARSA) | SEQ ID NO: 233 | SEQ ID NO: 190 |
| Leukodystrophy | | NM_000487.6(ARSA) | |
| Krabbe Disease (also | Galactosylceramidase | SEQ ID NO: 234 | SEQ ID NO: 191; |
| called globoid cell | (GALC) | | NP_000144.2 |
| leukodystrophy) | | | |
| Niemann-Pick, | Acid Sphingomyelinase | SEQ ID NO: 235 | SEQ ID NO: 192; |
| Types A & B | (SMPD1) | NM_000543.5 | NP_000534.3 |
| | | (SMPD1) | (SMPD1) |
| Niemann-Pick, Type C1 | NPC intracellular | SEQ ID NO: 236 | SEQ ID NO: 193; |
| | cholesterol transporter 1 | NM_000271.5 | NP_000262.2 |
| | (NPC1) | (NPC1) | (NPC1) |
| Niemann-Pick, Type C2 | NPC intracellular | SEQ ID NO: 237 | SEQ ID NO: 194; |
| | cholesterol transporter 2 | NM_006432.5 | NP_006423.1 |
| | (NPC2) | (NPC2) | (NPC2) |
| Farber Disease (Farber | Acid Ceramidase | SEQ ID NO: 238 | SEQ ID NO: 195; |
| lipogranulomatosis) | (ASAH1)(also known as | NM_004315.6 | NP_004306.3 |
| | N-acylsphingosine | (ASAH1) | (ASAH1) |
| | amidohydrolase) | | |
| Wolman Disease (also | Lysomal Acid Lipase | SEQ ID NO: 239 | SEQ ID NO: 196; |
| known as Lysosomal acid | (LIPA) (also known | NM_000235.4 | NP_000226.2 |
| lipase deficiency) | as Lipase A) | (LIPA) | (LIPA) |

C. Mucopolysaccharide disorders

| | | | |
|---|---|---|---|
| Mucopolysaccharidosis | α-L-Iduronidase | SEQ ID NO: 240; | SEQ ID NO: 197; |
| type 1 (MPS 1) (includes | (IDUA) | NM_000203.5 | NP_000194.2 |
| 3 MPS I types: Hurler | | (IDUA) | (IDUA) |
| Syndrome (MPS IH); | | | |
| Scheie Syndrome (MPS | | | |
| IS) Hurler-Scheie | | | |
| (MPS IH/S) | | | |
| Mucopolysaccharidosis | Iduronate Sulfatase | SEQ ID NO: 241; | SEQ ID NO: 198; |
| type II (MPS II), (also | (IDS) | NM_000202.8 | NP_000193.1 |
| known as Hunter | | (IDS) | (IDS) |
| syndrome) | | | |
| Sanfilippo A | Heparan N-Sulfatase | SEQ ID NO: 242; | SEQ ID NO: 199; |
| (MPS IIIA) | (also referred to as | NM_000199.5 | NP_000190.1 |
| | N-sulfoglucosamine | (SGSH) | (SGSH) |
| | sulfohydrolase) | | |
| | (SGSH) | | |
| Sanfilippo B | α-N- | SEQ ID NO: 243; | SEQ ID NO: 200 |
| (MPS IIIB) | Acetylglucosaminidase | NM_000263.4 | NP_000254.2 |
| | (NAGLU) | (NAGLU) | (NAGLU) |
| Sanfilippo C | Acetyl-CoA- | SEQ ID NO: 244; | SEQ ID NO: 201; |
| (MPS IIIC) | Glucosaminide | NM_152419.3 | NP_689632.2 |
| | Acetyltransferase (also | (HGSNAT) | (HGSNAT) |
| | referred to as heparan- | | |
| | alpha-glucosaminide N- | | |
| | acetyltransferase) (often | | |
| | shortened to N- | | |
| | acetyltransferase) | | |
| | HGSNAT) | | |
| Sanfilippo D | N-Acetylglucosamine- | SEQ ID NO: 245; | SEQ ID NO: 202; |
| (MPS IIID) | 6-Sulfatase (GNS) | NM_002076.4 | NP_002067.1 |
| | (also referred to | (GNS) | (GNS) |
| | as glucosamine | | |
| | (N-acetyl)-6-sulfatase) | | |
| Mucopolysaccharidosis | Galactosamine-6- | SEQ ID NO: 246; | SEQ ID NO: 203; |
| type IVA (MPS IVA) | Sulfatase | NM_000512.5 | NP_000503.1 |
| also known as | (GALNS) | (GALNS) | (GALNS) |
| Morquio A syndrome) | | | |
| Mucopolysaccharidosis | β-Galactosidase | SEQ ID NO: 227; | SEQ ID NO: 185 |
| type IVB (MPS IVB), | (GLB1) | GLB1 | NP_000395.3 |
| (also known as | | (NM_000404.4) | |
| Morquio B syndrome) | | | |
| Mucopolysaccharidosis | Arylsulfatase B | SEQ ID NO: 247; | SEQ ID NO: 204 |
| type VI (MPS VI), (also | (ARSB) | NM_000046.5 | NP_000037.2 |
| known as Maroteaux- | | (ARSB) | (ARSB) |
| Lamy syndrome) | | | |
| Mucopolysaccharidosis | β-Glucuronidase | SEQ ID NO: 248 | SEQ ID NO: 205 |
| type VII (MPS VII), (also | (GUSB) | NM_000181.4 | NP_000172.2 |
| known as Sly syndrome) | | (GUSB) | (GUSB) |

D. Oligosaccharide,Glycoprotein Disorders

| | | | |
|---|---|---|---|
| α-Mannosidosis | α-Mannosidosis | SEQ ID NO: 249 | SEQ ID NO: 206 |
| | (MAN2B1) | | |
| | | NM_000528.4 | NP_000519.2 |
| | | (MAN2B1) | (MAN2B1) |
| α-Mannosidosis | α-Mannosidosis | SEQ ID NO: 250 | SEQ ID NO: 207 |
| | (MANBA) | NM_005908.4 | NP_005899.3 |
| | | (MANBA) | (MANBA) |
| Fucosidosis | α-L-Fucosidase | SEQ ID NO: 251 | SEQ ID NO: 208 |
| | (FUCA1) | NM_000147.4 | NP_000138.2 |
| | | (FUCA1) | (FUCA1) |
| Aspartylglucosaminuria | N-Aspartyl-β- | SEQ ID NO: 252 | SEQ ID NO: 209 |
| | Glucosaminidase | NM_000027.4 | NP_000018.2 |
| | (AGA) (also known as | (AGA) | (AGA) |
| | aspartylglucosaminidase | | |
| | (ASRG)or N(4)-(beta- | | |
| | N-acetylglucosaminyl)- | | |
| | L-asparaginase or | | |
| | glycosylasparaginase | | |
| | (AGU) | | |
| Sialidosis | neuraminidase 1 | SEQ ID NO: 253 | SEQ ID NO: 210 |
| (Mucolipidosis 1) | (also referred to as | NM_000434.4 | NP_000425.1 |
| | α-Neuraminidase) | (NEU1) | (NEU1) |
| | (NEU1) | | |
| Galactosialidosis (also | Cathepsin A (CTSA) | SEQ ID NO: 254 | SEQ ID NO: 211 |
| known as Goldberg | (also known | NM_000308.4 | NP_000299.3 |
| Syndrome or Lysosomal | as protective | (CTSA) | (CTSA) |
| Protective Protein | protein/cathepsin | | |
| Deficiency or PPCA | A or PPCA or | | |
| deficiency or | PPGB, or GSL) | | |
| neuraminidase | | | |
| deficiency with | | | |
| beta-galactosidase | | | |
| deficiency) | | | |
| Schindler Disease (also | α-N-Acetyl- | SEQ ID NO: 255 | SEQ ID NO: 212 |
| referred to as NAGA | Galactosaminidase | NM_000262.3 | NP_000253.1 |
| deficiency or alpha- | (NAGA) (also | (NAGA) | (NAGA) |
| galactosidase B | referred to a | | |
| deficiency) | alpha-galactosidase | | |
| | B or GALB) | | |

E. Lysosomal Enzyme Transport Disorders

| | | | |
|---|---|---|---|
| Mucolipidosis II | N-Acetylglucosamine- | SEQ ID NO: 256 | SEQ ID NO: 213 |
| (I-Cell Disease) | 1-Phosphotransferase | NM_024312.5 | NP_077288.2 |
| | (GNPTAB) | (GNPTAB) | (GNPTAB) |
| | (also referred | | |
| | to as GlcNAc- | | |
| | 1-phosphotransferase) | | |
| Mucolipidosis III | Same as MLII | SEQ ID NO: 256 | SEQ ID NO: 213 |
| (Pseudo-Hurler | | | |
| Polydystrophy) | | | |

F. Lysosomal Membrane

| | | | |
|---|---|---|---|
| Transport Disorders | | | |
| Cystinosis | cystinosin (also referred | SEQ ID NO: 257 | SEQ ID NO: 214 |
| | to as lysosomal cystine | NM_004937.3 | NP_004928.2 |
| | transporter) (CTNS) | (CTNS) | (CTNS) |
| Sialic acid storage disease | solute carrier family 17 | SEQ ID NO: 258 | SEQ ID NO: 2015 |
| (Salla Disease is a less | member 5 (SLC17A5) | NM_012434.5 | NP_036566.1 |
| severe form) | (also known as Sialin or | (SLC17A5) | (SLC17A5) |
| | Sialic Acid Transport | | |
| | Protein or SAISD, SD, | | |
| | ISSD, NSD) | | |
| Infantile Sialic Acid | solute carrier family 17 | SEQ ID NO: 1258 | SEQ ID NO: 215 |
| Storage Disease (ISSD) | member 5 (SLC17A5) | | |
| | (also known as Sialin or | | |
| | Sialic Acid Transport | | |
| | Protein or SAISD, SD, | | |
| | ISSD, NSD) | | |

G. Other

| | | | |
|---|---|---|---|
| CLN3 disease | Battenin (also | SEQ ID NO: 259 | SEQ ID NO: 216 |
| (including Batten | referred to as CLN3 | NM_000086.2 | NP_000077.1 |
| Disease (Juvenile | lysosomal/endosomal | (CLN3) | (CLN3) |
| Neuronal Ceroid | transmembrane protein | | |
| Lipofuscinosis) | or Batten) (CLN3) | | |
| Infantile Neuronal | Palmitoyl-Protein | SEQ ID NO: 260 | SEQ ID NO: 217 |
| Ceroid Lipofuscinosis | Thioesterase 1 | NM_000310.3 | NP_000301.1 |
| (or infantile Batten | (PPT1 gene) | (PPT1) | (PPT1) |
| disease) | | | |
| (CLN1 disease) | | | |
| Mucolipidosis IV | mucolipin-1 | SEQ ID NO: 261 | SEQ ID NO: 218 |
| | (MCOLN1) | NM_020533.3 | NP_065394.1(MCO |
| | | (MCOLN1) | LN1) |
| Prosaposin Deficiency | Prosaposin (PSAP). | SEQ ID NO: 262 | SEQ ID NO: 219 |
| (associated with | PSAP protein is the | PSAP | NP_002769.1 |
| metachromatic | precursor of four smaller | (NM_002778.4) | (PSAP) |
| leukodystrophy or | proteins called saposin | | |
| PSAP mutation) | A, B, C, and D) | | |

TABLE 6B
Exemplary Lysosomal Storage Diseases (LSD) and proteins to be expressed by
targeting vectors or rAAV vectors, and nucleic acid sequences encoding the proteins.

| Disease | Enzyme defect | Nucleic acid sequence | Protein sequence |
|---|---|---|---|
| Ehlers-Danlos | PLOD1 lysyl | SEQ ID NO: 263 | SEQ ID NO: 220 |
| Syndrome Type | Hydroxylase (PLOD1) | NM_000302.4 | NP_000293.2 |
| VI | (procollagen-lysine, | | |
| | 2-oxoglutarate | | |
| | 5-dioxygenase 1) | | |
| Type Ia glycogen | glucose6 phosphatase | SEQ ID NO: 264 | SEQ ID NO: 221 |
| storage disease | catalytic subunit | NM_000151.4 | NP_000142.2 |
| (GSDIa) | (G6PC) | (G6PC) | (G6PC) |
| Type Ib glycogen | solute carrier family 37 | SEQ ID NO: 265 | SEQ ID NO: 222 |
| storage disease | member 4 (also known | NM_001467.6 | NP_001458.1 |
| (GSDIb) | as glucose 6-phosphate | (SLC37A4) | (SLC37A4) |
| | translocase protein or | | |
| | G6PT1 or GSDIb) | | |
| | (SLC37A4) | | |

Congenital Disorders of Glycosylation

| | | | |
|---|---|---|---|
| ALG6-congenital | ALG6 α1,3 | SEQ ID NO: 266 | SEQ ID NO: 223 |
| disorder of | glucosyltransferase | NM_013339.4 | NP_037471.2 |
| glycosylation | (ALG6) | (ALG6) | (ALG6) |
| (ALG6-CDG) | | | |
| (also known as | | | |
| congenital disorder | | | |
| of glycosylation | | | |
| type Ic or CDG 1c) | | | |
| congenital disorder | ALG3 | SEQ ID NO: 267 | SEQ ID NO: 224 |
| of glycosylation | α1,3 | NM_005787.6 | NP_005778.1 |
| type Id (CDG-Id) | mannosyltransferase | (ALG3) | (ALG3) |
| characterized by | (ALG3) | | |
| abnormal | | | |
| N-glycosylation | | | |
| Congenital disorder | MGAT2 (encodes | SEQ ID NO: 268 | SEQ ID NO: 225 |
| of glycosylation | N-acetylglucosaminyl- | NM_002408.4 | NP_002399.1 |
| 2A (CDG2A or | transferase II | (MGAT2) | (MGAT2) |
| CDG IIa) | (also referred to as | | |
| | alpha-1,6-mannosyl- | | |
| | glycoprotein 2-beta- | | |
| | N-acetylglucosaminyl- | | |
| | transferase | | |
| | or GNT-II) | | |
| Type IIb | GCSI | SEQ ID NO: 269 | SEQ ID NO: 226 |
| congenital | α1,2-Glucosidase 1 | NM_006302.3 | NP_006293.2 |
| disorder of | (GDG2B or GCS1) | (MOGS) | (MOGS) |
| glycosylation | (also known as | | |
| (CDG IIb) | mannosyl- | | |
| | oligosaccharide | | |
| | glucosidase or MOGS) | | |

### VII. Administration

[0529] In some embodiments, the technology described herein relates to methods and compositions for administering a rAAV vector or rAAV genome as disclosed herein to a subject with a lysosomal disease or disorder, e.g., to a subject with Pompe disease. In some embodiments, the method comprises administering a composition comprising a homogenous population of rAAV vector comprising a rAAV vector, where the rAAV vector is a AAV3 or AAV8 vector, or a haploid rAAV vector comprising at least one capsid protein from AAV3 or AAV8 as disclosed herein. In some embodiments, the subject is administered a cocktail of different rAAV vectors as disclosed herein, e.g., a composition comprising a rAAV vector targeting or transduces liver cells and a rAAV vector that targets or transduces muscle cells. In an exemplary embodiment, a subject is administered a composition comprising cocktail of two or more different rAAV vectors as disclosed herein, e.g., a compostions comprising a AAV3 vector and AAV8 vector as disclosed herein, where each AAV vector comprises a nucleic acid encoding a GAA polypeptide operatively linked to a LSP as disclosed herein.

[0530] In some embodiments, the subject is co-administered, for example at the same time, or subsequently, two or more different rAAV vectors as disclosed herein. For exemplary purposes only, a subject can be administered a composition comprising a rAAV vector that targets or transduces liver cells and where the subject is also co-administered a composition comprising a rAAV vector that targets or transduces muscle cells. In an exemplary embodiment, a subject is co-administered a composition comprising a rAAV vector as disclosed herein, e.g., a composition comprising a AAV3 vector or variant thereof as disclosed herein, which comprises a nucleic acid encoding a GAA polypeptide operatively linked to a LSP as disclosed herein, and where the subject is also co-administered a composition comprising a different rAAV vector as disclosed herein, e.g., a compostions comprising a AAV8 vector or haploid AAV vector which comprises a nucleic acid encoding a GAA polypeptide operatively linked to a LSP as disclosed herein, or alternatively, where the LSP is replaced with a different promoter, e.g., a muscle specific promoter.

[0531] Dosages of the a rAAV vector or rAAV genome as disclosed herein to be administered to a subject depend upon the mode of administration, the severity of the Pompe disease or other condition to be treated and/or prevented, the individual subject's condition, the particular virus vector or capsid, and the nucleic acid to be delivered, and the like, and can be determined in a routine manner. Exemplary doses for achieving therapeutic effects are titers of at least about 10⁵, 10⁶, 10⁷, 10⁸, 10⁹, 10¹⁰, 10¹¹, 10¹², 10¹³, 10¹⁴, 10¹⁵ transducing units, optionally about 10⁸ to about 10¹³ transducing units.

[0532] In a further embodiment, administration of rAAV vector or rAAV genome as disclosed herein to a subject results in production of a GAA protein with a circulatory half-life of 2 hours, 3 hours, 4 hours, 5 hours, 6 hours, 7 hours, 8 hours, 9 hours, 10 hours, 11 hours, 12 hours, 13 hours, 14 hours, 15 hours, 16 hours, 17 hours, 18 hours, 19 hours, 20 hours, 21 hours, 22 hours, 23 hours, 1 day, 2 days, 3 days, 4 days, 5 days, 6 days, 7 days, 1 week, 2 weeks, 3 weeks, 4 weeks, one month, two months, three months, four months or more.

[0533] In an embodiment, the period of administration of a rAAV vector or rAAV genome as disclosed herein to a subject is for 1 day, 2 days, 3 days, 4 days, 5 days, 6 days, 7 days, 8 days, 9 days, 10 days, 11 days, 12 days, 13 days, 14 days, 3 weeks, 4 weeks, 5 weeks, 6 weeks, 7 weeks, 8 weeks, 9 weeks, 10 weeks, 11 weeks, 12 weeks, 4 months, 5 months, 6 months, 7 months, 8 months, 9 months, 10 months, 11 months, 12 months, or more. In a further embodiment, a period of during which administration is stopped is for 1 day, 2 days, 3 days, 4 days, 5 days, 6 days, 7 days, 8 days, 9 days, 10 days, 11 days, 12 days, 13 days, 14 days, 3 weeks, 4 weeks, 5 weeks, 6 weeks, 7 weeks, 8 weeks, 9 weeks, 10 weeks, 11 weeks, 12 weeks, 4 months, 5 months, 6 months, 7 months, 8 months, 9 months, 10 months, 11 months, 12 months, or more.

[0534] In another embodiment, administration of a rAAV vector or rAAV genome as disclosed herein for the treatment of Pompe Disease results in an increase in weight by, e.g., at least 0.5 pounds, at least 1 pound, at least 1.5 pounds, at least 2 pounds, at least 2.5 pounds, at least 3 pounds, at least 3.5 pounds, at least 4 pounds, at least 4.5 pounds, at least 5 pounds, at least 5.5 pounds, at least 6 pounds, at least 6.5 pounds, at least 7 pounds, at least 7.5 pounds, at least 8 pounds, at least 8.5 pounds, at least 9 pounds, at least 9.5 pounds, at least 10 pounds, at least 10.5 pounds, at least 11 pounds, at least 11.5 pounds, at least 12 pounds, at least 12.5 pounds, at least 13 pounds, at least 13.5 pounds, at least 14 pounds, at least 14.5 pounds, at least 15 pounds, at least 20 pounds, at least 25 pounds, at least 30 pounds, at least 50 pounds.

[0535] In another embodiment, an AAV GAA of any serotype, as disclosed herein for the treatment of Pompe Disease results in an increase in weight by, e.g., from 0.5 pounds to 50 pounds, from 0.5 pounds to 30 pounds, from 0.5 pounds to 25 pounds, from 0.5 pounds to 20 pounds, from 0.5 pounds to 15 pounds, from 0.5 pounds to ten pounds, from 0.5 pounds to 7.5 pounds, from 0.5 pounds to 5 pounds, from 1 pound to 15 pounds, from 1 pound to 10 pounds, from 1 pound to 7.5 pounds, form 1 pound to 5 pounds, from 2 pounds to ten pounds, from 2 pounds to 7.5 pounds.

[0536] A. Pharmaceutical Compositions

[0537] The rAAV vectors as disclosed herein for use in the methods of administration as disclosed herein can be formulated in a pharmaceutical composition with a pharmaceutically acceptable excipient, i.e., one or more pharmaceutically acceptable carrier substances and/or additives, e.g., buffers, carriers, excipients, stabilizers, etc. The pharmaceutical composition may be provided in the form of a kit. Pharmaceutical compositions comprising the rAAV vectors as disclosed herein for use in the methods of administration as disclosed herein and uses thereof are known in the art.

[0538] Accordingly, a further aspect of the invention provides a pharmaceutical composition comprising a rAAV vector as disclosed herein for use in the methods of administration as disclosed herein. Relative amounts of the active ingredient (e.g. a rAAV vectors aa disclosed herein), a pharmaceutically acceptable excipient, and/or any additional ingredients in a pharmaceutical composition in accordance with the present disclosure may vary, depending upon the identity, size, and/or condition of the subject being treated and further depending upon the route by which the composition is to be administered. For example, the composition may comprise between 0.1 percent and 99 percent (w/w) of the active ingredient. By way of example, the composition may comprise between 0.1 percent and 100 percent, e.g., between 0.5 and 50 percent, between 1-30 percent, between 5-80 percent, at least 80 percent (w/w) active ingredient.

[0539] The pharmaceutical compositions can be formulated using one or more excipients or diluents to (1) increase stability; (2) increase cell transfection or transduction; (3) permit the sustained or delayed release of the payload; (4) alter the biodistribution (e.g., target the viral particle to specific tissues or cell types); (5) increase the translation of encoded protein; (6) alter the release profile of encoded protein and/or (7) allow for regulatable expression of the payload of the invention. In some embodiments, a pharmaceutically acceptable excipient may be at least 95 percent, at least 96 percent, at least 97 percent, at least 98 percent, at least 99 percent, or 100 percent pure. In some embodiments, an excipient is approved for use for humans and for veterinary use. In some embodiments, an excipient may be approved by United States Food and Drug Administration. In some embodiments, an excipient may be of pharmaceutical grade. In some embodiments, an excipient may meet the standards of the United States Pharmacopoeia (USP), the European Pharmacopoeia (EP), the British Pharmacopoeia, and/or the International Pharmacopoeia. Excipients, as used herein, include, but are not limited to, any and all solvents, dispersion media, diluents, or other liquid vehicles, dispersion or suspension aids, surface active agents, isotonic agents, thickening or emulsifying agents, preservatives, and the like, as suited to the particular dosage form desired. Various excipients for formulating pharmaceutical compositions and techniques for preparing the composition are known in the art (see Remington: The Science and Practice of Pharmacy, 21 st Edition, A. R. Gennaro, Lippincott, Williams and Wilkins, Baltimore, Md., 2006; incorporated herein by reference in its entirety). The use of a conventional excipient medium may be contemplated within the scope of the present disclosure, except insofar as any conventional excipient medium may be incompatible with a substance or its derivatives, such as by producing any undesirable biological effect or otherwise interacting in a deleterious manner with any other component(s) of the pharmaceutical composition.

[0540] The rAAV vectors as disclosed herein for use in the methods of administration as disclosed herein may be used in combination with one or more other therapeutic, prophylactic, research or diagnostic agents. By “in combination with,” it is not intended to imply that the agents must be administered at the same time and/or formulated for delivery together, although these methods of delivery are within the scope of the present invention. Compositions can be administered concurrently with, prior to, or subsequent to, one or more other desired therapeutics or medical procedures. In some embodiments, the delivery of one treatment (e.g., gene therapy vectors) is still occurring when the delivery of the second (e.g., one or more therapeutic) begins, so that there is overlap in terms of administration. This is sometimes referred to herein as “simultaneous” or “concurrent delivery.” In other embodiments, the delivery of one treatment ends before the delivery of the other treatment begins. In some embodiments of either case, the treatment is more effective because of combined administration. For example, the second treatment is more effective, e.g., an equivalent effect is seen with less of the second treatment, or the second treatment reduces symptoms to a greater extent, than would be seen if the second treatment were administered in the absence of the first treatment, or the analogous situation is seen with the first treatment. In some embodiments, delivery is such that the reduction in a symptom, or other parameter related to the disorder is greater than what would be observed with one treatment delivered in the absence of the other. The effect of the two treatments can be partially additive, wholly additive, or greater than additive. The delivery can be such that an effect of the first treatment delivered is still detectable when the second is delivered. The composition described herein and the at least one additional therapy can be administered simultaneously, in the same or in separate compositions, or sequentially. For sequential administration, the gene therapy vectors described herein can be administered first, and the one or more therapeutic can be administered second, or the order of administration can be reversed. The gene therapy vectors and the one or more therapeutic can be administered during periods of active disorder, or during a period of remission or less active disease. The gene therapy vectors can be administered before another treatment, concurrently with the treatment, post-treatment, or during remission of the disorder.

[0541] When administered in combination, the rAAV vectors as disclosed herein for use in the methods of administration as disclosed herein and the one or more therapeutic (e.g., second or third therapeutic), or all, can be administered in an amount or dose that is higher, lower or the same as the amount or dosage of each used individually, e.g., as a monotherapy. In certain embodiments, the administered amount or dosage of a rAAV vector as disclosed herein for use in the methods of administration as disclosed herein and the one or more therapeutic (e.g., second or third agent), or all, is lower (e.g., at least 20%, at least 30%, at least 40%, or at least 50%) than the amount or dosage of each used individually. In other embodiments, the amount or dosage of the rAAV vector as disclosed herein for use in the methods of administration as disclosed herein and the one or more therapeutic (e.g., second or third agent), or all, that results in a desired effect (e.g., treatment of a cardiovascular disease or heart disease) is lower (e.g., at least 20%, at least 30%, at least 40%, or at least 50% lower) than the amount or dosage of each individually required to achieve the same therapeutic effect.

[0542] In some embodiments, the methods of administration of a rAAV vector as disclosed herein can deliver a rAVV vector disclosed herein alone, or in combination with an additional agent, for example, an immune modulator as disclosed herein.

[0543] B. Immune Modulator:

[0544] In some embodiments, the methods and compositions using the AAV vectors and AAV genomes as described herein, for treating lysosomal disease, e.g., Pompe, further comprises administering an immune modulator. In some embodiments, the immune modulator can be administered at the time of rAAV vector administration, before rAAV vector administration or, after the rAAV vector administration.

[0545] In some embodiments, the immune modulator is an immunoglobulin degrading enzyme such as IdeS, IdeZ, IdeS/Z, Endo S, or, their functional variant. Non-limiting examples of references of such immunoglobulin degrading enzymes and their uses as described in U.S. Pat. Nos. 7,666,582, 8,133,483, US 20180037962, US 20180023070, US 20170209550, U.S. Pat. No. 8,889,128, WO2010/057626, U.S. Pat. Nos. 9,707,279, 8,323,908, US 20190345533, US 20190262434, and WO2020/016318, each of which are incorporated in their entirety by reference.

[0546] In some embodiments, the immune modulator is Proteasome inhibitor. In certain aspects, the proteasome inhibitor is Bortezomib. In some aspects of the embodiment, the immune modulator comprises bortezomib and anti CD20 antibody, Rituximab. In other aspects of the embodiment, the immune modulator comprises bortezomib, Rituximab, methotrexate, and intravenous gamma globulin. Non-limiting examples of such references, disclosing proteasome inhibitors and their combination with Rituximab, methotrexate and intravenous gamma globulin, as described in U.S. Pat. Nos. 10,028,993, 9,592,247, and, U.S. Pat. No. 8,809,282, each of which are incorporated in their entirety by reference.

[0547] In alternative embodiments, the immune modulator is an inhibitor of the NF-kB pathway. In certain aspects of the embodiment, the immune modulator is Rapamycin or, a functional variant. Non-limiting examples of references disclosing rapamycin and its use described in U.S. Pat. No. 10,071,114, US 20160067228, US 20160074531, US 20160074532, US 20190076458, U.S. Pat. No. 10,046,064, are incorporated in their entirety. In other aspects of the embodiment, the immune modulator is synthetic nanocarriers comprising an immunosuppressant. Non limiting examples of references of immunosuppressants, immunosuppressants coupled to synthetic nanocarriers, synthetic nanocarriers comprising rapamycin, and/or, tolerogenic synthetic nanocarriers, their doses, administration and use as described in US20150320728, US 20180193482, US 20190142974, US 20150328333, US20160243253, U.S. Pat. No. 10,039,822, US 20190076522, US 20160022650, U.S. Pat. Nos. 10,441,651, 10,420,835, US 20150320870, US 2014035636, U.S. Pat. Nos. 10,434,088, 10,335,395, US 20200069659, U.S. Pat. No. 10,357,483, US 20140335186, U.S. Pat. Nos. 10,668,053, 10,357,482, US 20160128986, US 20160128987, US 20200038462, US 20200038463, each of which are incorporated in their entirety by reference.

[0548] In some embodiments, the immune modulator is synthetic nanocarriers comprising rapamycin (ImmTOR™ nanoparticles) (Kishimoto, et al., 2016, Nat Nanotechnol, 11(10): 890-899; Maldonado, et al., 2015, PNAS, 112(2): E156-165), as disclosed in US20200038463, U.S. Pat. No. 9,006,254 each of which is incorporated herein in its entirety. In some embodiments, the immune modulator is an engineered cell, e.g., an immune cell that has been modified using SQZ technology as disclosed in WO2017192786, which is incorporated herein in its entirety by reference.

[0549] In some embodiments, the immune modulator is selected from the group consisting of poly-ICLC, 1018 ISS, aluminum salts, Amplivax, AS15, BCG, CP-870,893, CpG7909, CyaA, dSLIM, GM-CSF, IC30, IC31, Imiquimod, ImuFact IMP321, IS Patch, ISS, ISCOMATRIX, JuvImmune, LipoVac, MF59, monophosphoryl lipid A, Montanide IMS 1312, Montanide ISA 206, Montanide ISA 50V, Montanide ISA-51, OK-432, OM-174, OM-197-MP-EC, ONTAK, PEPTEL, vector system, PLGA microparticles, resiquimod, SRL172, Virosomes and other Virus-like particles, YF-17D, VEGF trap, R848, beta-glucan, Pam3Cys, and Aquila's QS21 stimulon. In another further embodiment, the immunomodulator or adjuvant is poly-ICLC

[0550] In some embodiments, the immune modulator is a small molecule that inhibit the innate immune response in cells, such as chloroquine (a TLR signaling inhibitor) and 2-aminopurine (a PKR inhibitor), can also be administered in combination with the composition comprising at least one rAAV as disclosed herein. Some non-limiting examples of commercially available TLR-signaling inhibitors include BX795, chloroquine, CLI-095, OxPAPC, polymyxin B, and rapamycin (all available for purchase from INVIVOGEN™). In addition, inhibitors of pattern recognition receptors (PRR) (which are involved in innate immunity signaling) such as 2-aminopurine, BX795, chloroquine, and H-89, can also be used in the compositions and methods comprising at least one rAAV vector as disclosed herein for in vivo protein expression as disclosed herein.

[0551] In some embodiments, a rAAV vector can also encode a negative regulators of innate immunity such as NLRX1. Accordingly, in some embodiments, a rAAV vector can also optionally encode one or more, or any combination of NLRX1, NS1, NS3/4A, or A46R. Additionally, in some embodiments, a composition comprising at least one rAAV vector as disclosed herein can also comprise a synthetic, modified-RNA encoding inhibitors of the innate immune system to avoid the innate immune response generated by the tissue or the subject.

[0552] In some embodiments, an immune modulator for use in the administration methods as disclosed herein is an immunosuppressive agent. As used herein, the term “immunosuppressive drug or agent” is intended to include pharmaceutical agents which inhibit or interfere with normal immune function. Examples of immunosuppressive agents suitable with the methods disclosed herein include agents that inhibit T-cell/B-cell costimulation pathways, such as agents that interfere with the coupling of T-cells and B-cells via the CTLA4 and B7 pathways, as disclosed in U.S. Patent Pub. No 2002/0182211. In one embodiment, an immunosuppressive agent is cyclosporine A. Other examples include myophenylate mofetil, rapamicin, and anti-thymocyte globulin. In one embodiment, the immunosuppressive drug is administered in a composition comprising at least one rAAV vector as disclosed herein, or can be administered in a separate composition but simultaneously with, or before or after administration of a composition comprising at least one rAAV vector according to the methods of administration as disclosed herein. An immunosuppressive drug is administered in a formulation which is compatible with the route of administration and is administered to a subject at a dosage sufficient to achieve the desired therapeutic effect. In some embodiments, the immunosuppressive drug is administered transiently for a sufficient time to induce tolerance to the rAAV vector as disclosed herein.

[0553] In any embodiment of the methods and compositions as disclosed herein, a subject being administered a rAAV vector or rAAV genome as disclosed herein is also administered an immunosuppressive agent. Various methods are known to result in the immunosuppression of an immune response of a patient being administered AAV. Methods known in the art include administering to the patient an immunosuppressive agent, such as a proteasome inhibitor. One such proteasome inhibitor known in the art, for instance as disclosed in U.S. Pat. No. 9,169,492 and U.S. patent application Ser. No. 15/796,137, both of which are incorporated herein by reference, is bortezomib. In some embodiments, an immunosuppressive agent can be an antibody, including polyclonal, monoclonal, scfv or other antibody derived molecule that is capable of suppressing the immune response, for instance, through the elimination or suppression of antibody producing cells. In a further embodiment, the immunosuppressive element can be a short hairpin RNA (shRNA). In such an embodiment, the coding region of the shRNA is included in the rAAV cassette and is generally located downstream, 3′ of the poly-A tail. The shRNA can be targeted to reduce or eliminate expression of immunostimulatory agents, such as cytokines, growth factors (including transforming growth factors 31 and 02, TNF and others that are publicly known).

[0554] The use of such immune modulating agents facilitates the ability to for one to use multiple dosing (e.g., multiple administration) over numerous months and/or years. This permits using multiple agents as discussed below, e.g., a rAAV vector encoding multiple genes, or multiple administrations to the subject.

[0555] All aspects of the compositions and methods of the technology disclosed herein can be defined in any one or more of the following numbered paragraphs:
[0556] 1. A recombinant adenovirus associated (AAV) vector comprising in its genome: (a) 5′ and 3′ AAV inverted terminal repeats (ITR) sequences, and (b) located between the 5′ and 3′ ITRs, a heterologous nucleic acid sequence encoding an alpha-glucosidase (GAA) polypeptide, wherein the heterologous nucleic acid is operatively linked to a liver-specific promoter.
[0557] 2. The recombinant AAV vector of paragraph 1, wherein the heterologous nucleic acid sequence encoding the GAA polypeptide further comprises a signal peptide located 5′ of the nucleic acid encoding the alpha-glucosidase (GAA) polypeptide, or wherein the heterologous nucleic acid sequence encoding the GAA polypeptide further comprises a IGF2 targeting peptide at the N-terminus of GAA polypeptide.
[0558] 3. The recombinant AAV vector of paragraph 1, wherein the heterologous nucleic acid sequence encoding the GAA polypeptide further comprises a IGF2 targeting peptide located between the secretory signal peptide and the alpha-glucosidase (GAA) polypeptide, or wherein the heterologous nucleic acid sequence encoding the GAA polypeptide further comprises a IGF2 targeting peptide at the N-terminus of GAA polypeptide.
[0559] 4. The recombinant AAV vector of any of paragraphs 1-3, wherein the AAV genome comprises, in the 5′ to 3′ direction: (a) a 5′ ITR, (b) a liver-specific promoter sequence, (c) an intron sequence, (d) a nucleic acid encoding a secretory signal peptide, (e) a nucleic acid encoding an alpha-glucosidase (GAA) polypeptide, (f) a poly A sequence, and (g) a 3′ ITR. In some embodiments, the intron sequence (c) is absent.
[0560] 5. The recombinant AAV vector of any of paragraphs 1-3, wherein the AAV genome comprises, in the 5′ to 3′ direction: (a) a 5′ ITR, (b) a liver-specific promoter sequence, (c) an intron sequence, (d) a nucleic acid encoding an IGF2 targeting peptide, (e) a nucleic acid encoding an alpha-glucosidase (GAA) polypeptide, (f) a poly A sequence, and (g) a 3′ ITR. In some embodiments, the intron sequence (c) is absent.
[0561] 6. The recombinant AAV vector of any of paragraphs 1-6, wherein the AAV genome comprises, in the 5′ to 3′ direction: (a) a 5′ ITR, (b) a liver-specific promoter sequence, (c) an intron sequence, (d) a nucleic acid encoding a secretory signal peptide, (e) a nucleic acid encoding an IGF2 targeting peptide, (f) a nucleic acid encoding an alpha-glucosidase (GAA) polypeptide, (g) a poly A sequence, and (h) a 3′ ITR. In some embodiments, the intron sequence is absent.
[0562] 7. The recombinant AAV vector of any of paragraphs 1-6, wherein the secretory signal peptide is selected from an AAT signal peptide, a fibronectin signal peptide (FN1), a GAA signal peptide, or an active fragment thereof having secretory signal activity. For example, the nucleic acid encoding a secretory signal peptide, can be selected from an AAT signal peptide (e.g., SEQ ID NO: 17), a fibronectin signal peptide (FN1) (e.g., SEQ ID NO: 18-21), a cognate GAA signal peptide (SEQ ID NO: 175), an hIGF2 signal peptide (e.g., SEQ ID NO: 22), a IgG1 leader peptide (SEQ ID NO: 177), wtIL2 leader peptide (SEQ ID NO: 179), mutant IL2 leader peptide (SEQ ID NO: 181) or an active fragment thereof having secretory signal activity, e.g., a nucleic acid encoding an amino acid sequence that has at least about 75%, or 80%, or 85%, or 90%, or 95%, or 98%, or 99% sequence identity to SEQ ID NOs: 17-22, 175, 177, 179 or 181.
[0563] 8. The recombinant AAV vector of any of paragraphs 1-7, wherein the IGF2 targeting peptide binds human cation-independent mannose-6-phosphate receptor (CI-MPR) or the IGF2 receptor.
[0564] 9. The recombinant AAV vector of any of paragraphs 1-5, wherein the IGF2 targeting peptide comprises SEQ ID NO: 5 or comprises at least one amino modification in SEQ ID NO: 5 that does not affect the binding to the CI-MPR receptor, or that reduces its binding to one or more IGF binding proteins (IGFBPs, such as IGFBP1-6).
[0565] 10. The recombinant AAV vector of any of paragraphs 1-9, wherein the at least one amino modification in SEQ ID NO: 5 is a V43M amino acid modification (SEQ ID NO: 8 or SEQ ID NO: 9) or Δ2-7 (SEQ ID NO: 6) or Δ1-7 (SEQ ID NO: 7).
[0566] 11. The recombinant AAV vector of any of paragraphs 1-10, wherein the liver-specific promoter is a promoter of any of the sequence listed in Table 4 herein, or Table 4A or 4B provisional application 62,937,556, filed on Nov. 19, 2019, or a functional variant thereof or functional fragment thereof.
[0567] 12. The recombinant AAV vector of any of paragraphs 1-10, wherein the liver-specific promoter comprises CRM_SP0412 (SEQ ID NO: 86) or SP0412 (SEQ ID NO: 91) or a functional variant or functional fragment thereof having at least 60% activity to SEQ ID NO: 86 or SEQ ID NO: 91.
[0568] 13. The recombinant AAV vector of any of paragraphs 1-12, wherein the liver specific promoter is selected from any of: (i) SP0422 (SEQ ID NO: 92) or a functional variant or functional fragment thereof having at least 60% activity to SEQ ID NO: 92; (ii) CRM_SP0239 (SEQ ID NO: 87) or SP0239 (SEQ ID NO: 93) or SP0238-UTR (SEQ ID NO: 147) or a functional variant or functional fragment thereof having at least 60% activity to SEQ ID NO: 87, SEQ ID NO: 93 or SEQ ID NO: 147; (iii) CRM_SP0265 (SP0131_A1) (SEQ ID NO: 88) or SP0265 (LVR SP0131 A1) (SEQ ID NO: 94) or SP0265-UTR (SEQ ID NO: 146) or a functional variant or functional fragment thereof having at least 60% activity to SEQ ID NO: 88, SEQ ID NO: 94 or SEQ ID NO: 146; (iv) CRM_SP0240 (SEQ ID NO: 89) or SP0240 (SEQ ID NO: 95) or SP0240-UTR (SEQ ID NO: 148) or a functional variant or functional fragment thereof having at least 60% activity to SEQ ID NO: 89, SEQ ID NO: 95 or SEQ ID NO: 148; (v) CRM_SP0246 (SEQ ID NO: 90) or SP0246 (SEQ ID NO: 96) or SP0246-UTR (SEQ ID NO: 149) or a functional variant or functional fragment thereof having at least 60% activity to SEQ ID NO: 90, SEQ ID NO: 96 or SEQ ID NO: 149.
[0569] 14. The recombinant AAV vector of any of paragraphs 1-13, wherein the nucleic acid sequence encodes a wild-type GAA polypeptide or a modified GAA polypeptide.
[0570] 15. The recombinant AAV vector of any of paragraphs 1-14, wherein the nucleic acid sequence encoding the GAA polypeptide is the human GAA gene or a human codon optimized GAA gene (coGAA) or a modified GAA nucleic acid sequence.
[0571] 16. The recombinant AAV vector of any of paragraphs 1-15, wherein the nucleic acid sequence encoding the GAA polypeptide is codon optimized for enhanced expression in vivo.
[0572] 17. The recombinant AAV vector of any of paragraphs 1-16, wherein the nucleic acid sequence encoding the GAA polypeptide is codon optimized to reduce CpG islands.
[0573] 18. The recombinant AAV vector of any of paragraphs 1-17, wherein the nucleic acid sequence encoding the GAA polypeptide is codon optimized to reduce the innate immune response or to reduce CpG islands, or to reduce the innate immune response and reduce the innate immune response.
[0574] 19. The recombinant AAV vector of any of paragraphs 1-18, wherein the nucleic acid sequence encodes a GAA polypeptide which comprises at least one, at least 2 or at least all three amino acid modifications selected from; H201L, H199R or R233H of SEQ ID NO: 10.
[0575] 20. The recombinant AAV vector of any of paragraphs 1-19, wherein the encoded polypeptide further comprising a spacer comprising a nucleotide sequence for at least 1 amino acids located amino-terminal to the GAA polypeptide, and C-terminal to the IGF2 targeting peptide.
[0576] 21. The recombinant AAV vector of any of paragraphs 1-20, further comprising a nucleic acid encoding a spacer of at least 1 amino acids located between the nucleic acid encoding the IGF2 targeting peptide and the nucleic acid encoding the GAA polypeptide.
[0577] 22. The recombinant AAV vector of any of paragraphs 1-21, further comprising at least one polyA sequence located 3′ of the nucleic acid encoding the GAA gene and 5′ of the 3′ ITR sequence.
[0578] 23. The recombinant AAV vector of any of paragraphs 1-22, wherein the heterologous nucleic acid sequence further comprises at collagen stability (CS) sequence located 3′ of the nucleic acid encoding the GAA polypeptide and 5′ of the 3′ ITR sequence.
[0579] 24. The recombinant AAV vector of any of paragraphs 1-23, further comprising a nucleic acid encoding a collagen stability (CS) sequence located between the nucleic acid encoding the GAA polypeptide and the poly A sequence

[0580] 25. The recombinant AAV vector of any of paragraphs 1-24, further comprising an intron sequence located 5′ of the sequence encoding the secretory signal peptide, and 3′ of the promoter.
[0581] 26. The recombinant AAV vector of any of paragraphs 1-25, wherein the intron sequence comprises a MVM sequence, SV40 sequence or a HBB2 sequence, wherein the MVM sequence comprises the nucleic acid sequence of SEQ ID NO: 13, or a nucleic acid sequence at least about 75%, or 80%, or 85%, or 90%, or 95%, or 98%, or 99% sequence identity to SEQ ID NO: 13, and the HBB2 sequence comprises the nucleic acid sequence of SEQ ID NO: 14, or a nucleic acid sequence at least about 75%, or 80%, or 85%, or 90%, or 95%, or 98%, or 99% sequence identity to SEQ ID NO: 14.
[0582] 27. The recombinant AAV vector of any of paragraphs 1-26, wherein the ITR comprises an insertion, deletion or substitution.
[0583] 28. The recombinant AAV vector of any of paragraphs 1-27, wherein one or more CpG islands in the ITR are removed.
[0584] 29. The recombinant AAV vector of any of paragraphs 1-28, wherein:
   [0585] a. the heterologous nucleic acid sequence encodes a secretory signal peptide selected from:
      [0586] 1. a fibronectin signal peptide (FN1) or an active fragment thereof having secretory signal activity (e.g., a FN1 signal peptide has the sequence of any of SEQ ID NO: 18-21, or an amino acid sequence at having at least about 75%, or 80%, or 85%, or 90%, or 95%, or 98%, or 99% sequence identity to any of SEQ ID NOs: 18-21),
      [0587] 2. an AAT signal peptide (e.g., SEQ ID NO: 17), or an amino acid sequence at having at least about 75%, or 80%, or 85%, or 90%, or 95%, or 98%, or 99% sequence identity to any of SEQ ID NO: 17;
      [0588] 3. an hIGF2 signal peptide (e.g., SEQ ID NO: 22), or an amino acid sequence at having at least about 75%, or 80%, or 85%, or 90%, or 95%, or 98%, or 99% sequence identity to any of SEQ ID NO: 22;
      [0589] 4. a IgG1 leader peptide (SEQ ID NO: 177), or an amino acid sequence at having at least about 75%, or 80%, or 85%, or 90%, or 95%, or 98%, or 99% sequence identity to any of SEQ ID NO: 177;
      [0590] 5. a wtIL2 leader peptide (SEQ ID NO: 179), or an amino acid sequence at having at least about 75%, or 80%, or 85%, or 90%, or 95%, or 98%, or 99% sequence identity to any of SEQ ID NO: 179;
      [0591] 6. a mutant IL2 leader peptide (SEQ ID NO: 181) or an amino acid sequence at having at least about 75%, or 80%, or 85%, or 90%, or 95%, or 98%, or 99% sequence identity to any of SEQ ID NO: 181, and
   [0592] b. the heterologous nucleic acid sequence encodes a GAA polypeptide is selected from any of the group consisting of: SEQ ID NO: 11, SEQ ID NO: 72 or SEQ ID NO: 182 or a nucleic acid sequence having at least 60%, or 70%, or 80%, 85% or 90% or 95%, or 98%, or 99% sequence identity to SEQ ID NO: 11, SEQ ID NO: 72, or SEQ ID NO: 182, and optionally, the nucleic acid sequence encodes a GAA polypeptide with at least one, at least 2 or at least all three amino acid modifications selected from; H201L, H199R or R233H of SEQ ID NO: 10.
[0593] 30. The recombinant AAV vector of paragraph 29, wherein the heterologous nucleic acid also encodes a IGF2 targeting peptide selected from any of: SEQ ID NO: 5, SEQ ID NO: 6, SEQ ID NO: 7, SEQ ID NO: 8 or SEQ ID NO: 9, or a IGF2 peptide having at least about 75%, or 80%, or 85%, or 90%, or 95%, or 98%, or 99% sequence identity to SEQ ID NOs: 5-9.
[0594] 31. The recombinant AAV vector of any of paragraphs 1-30, wherein the encoded secretory signal peptide is AAT signal peptide or an active fragment thereof having secretory signal activity, (e.g., a AAT signal peptide has the sequence of SEQ ID NO: 17, or an amino acid sequence at having at least about 75%, or 80%, or 85%, or 90%, or 95%, or 98%, or 99% sequence identity to SEQ ID NO: 17), and the heterologous nucleic acid sequence encodes a IGF2 targeting peptide selected from any of: SEQ ID NO: 5, SEQ ID NO: 6, SEQ ID NO: 7, SEQ ID NO: 8 or SEQ ID NO: 9, or a IGF2 peptide having at least about 75%, or 80%, or 85%, or 90%, or 95%, or 98%, or 99% sequence identity to SEQ ID NOs: 5-9.
[0595] 32. The recombinant AAV vector of any of paragraphs 1-31, wherein the IGF2 targeting peptide is SEQ ID NO: 8 or SEQ ID NO: 9, or a IGF2 peptide having at least about 75%, or 80%, or 85%, or 90%, or 95%, or 98%, or 99% sequence identity to SEQ ID NO: 8 or 9.
[0596] 33. The recombinant AAV vector of any of paragraphs 1-32, wherein the recombinant AAV vector is selected from any of: a chimeric AAV vector, a haploid AAV vector, a hybrid AAV vector, a polyploid AAV vector, a rational haploid vector, a mosaic AAV vector, a chemically modified AAV vector, or a AAV vector from any AAV serotypes, e.g., any serotype listed in Table 1 of disclosed in International Applications WO2020/102645, and WO2020/102667.
[0597] 34. The recombinant AAV vector of any of paragraphs 1-33, wherein the recombinant AAV vector comprises a capsid protein selected from any AAV serotype in the group consisting of those listed in Table 1 of U.S. provisional application 62,937,556, filed on Nov. 19, 2019, or in International Applications WO2020/102645, and WO2020/102667, or and any combination thereof.
[0598] 35. The recombinant AAV vector of any of paragraphs 1-34, wherein the AAV vector is selected from a serotype from the group consisting of: a AAV3 vector, a AAVXL32 vector, a AAVXL32.1 vector, a AAV8 vector, or a haploid AAV8 vector comprising at least one AAV8 capsid protein.
[0599] 36. The recombinant AAV vector of any of paragraphs 1-35, wherein the AAV3b serotype comprises one or mutations in a capsid protein selected from any of: 265D, 549A, Q263Y
[0600] 37. The recombinant AAV vector of any of paragraphs 1-36, wherein the AAV3b serotype is selected from any of: AAV3b265D, AAV3b265D549A, AAV3b549A or AAV3bQ263Y, or AAV3bSASTG. 38. A recombinant adenovirus associated (AAV) vector comprising in its genome:
   [0601] a. 5′ and 3′ AAV inverted terminal repeats (ITR) sequences, and
   [0602] b. located between the 5′ and 3′ ITRs, a heterologous nucleic acid sequence encoding an alpha-glucosidase (GAA) polypeptide, wherein the heterologous nucleic acid is operatively linked to a liver specific promoter, and
   [0603] wherein the recombinant AAV vector comprises a capsid protein of the AAV8 serotype or AAV3b serotype.
[0604] 39. The recombinant AAV vector of paragraph 38, wherein the GAA polypeptide further comprises a secretory signal peptide located at the N-terminal of the GAA polypeptide.
[0605] 40. The recombinant AAV vector of paragraph 38-39, wherein the heterologous nucleic acid sequence encoding the GAA polypeptide further comprises a IGF2 targeting peptide located N-terminal of the GAA polypeptide, or located between the secretory signal peptide and the an alpha-glucosidase (GAA) polypeptide.
[0606] 41. The recombinant AAV vector of paragraph 38, wherein the AAV genome comprises, in the 5′ to 3′ direction: a 5′ ITR, a liver specific promoter sequence, a nucleic acid encoding an alpha-glucosidase (GAA) polypeptide, a poly A sequence, and a 3′ ITR.
[0607] 42. The recombinant AAV vector of paragraph 38, wherein the AAV genome comprises, in the 5′ to 3′ direction: a 5′ ITR, a liver specific promoter sequence, a nucleic acid encoding a secretory signal peptide, a nucleic acid encoding an alpha-glucosidase (GAA) polypeptide, a poly A sequence, and a 3′ ITR.
[0608] 43. The recombinant AAV vector of paragraph 38, wherein the AAV genome comprises, in the 5′ to 3′ direction: a 5′ ITR, a liver specific promoter sequence, an intron sequence, a nucleic acid encoding a secretory signal peptide, a nucleic acid encoding an alpha-glucosidase (GAA) polypeptide, a poly A sequence, and a 3′ ITR.
[0609] 44. The recombinant AAV vector of paragraph 38, wherein the AAV genome comprises, in the 5′ to 3′ direction: a 5′ ITR, a liver specific promoter sequence, an intron sequence, a nucleic acid encoding a secretory signal peptide, a nucleic acid encoding a IGF2 targeting peptide, a nucleic acid encoding an alpha-glucosidase (GAA) polypeptide, a poly A sequence, and a 3′ ITR.
[0610] 45. The recombinant AAV vector of paragraph 38, wherein the AAV genome comprises, in the 5′ to 3′ direction: a 5′ ITR, a liver specific promoter sequence, an intron sequence, a nucleic acid encoding a secretory signal peptide, a nucleic acid encoding a IGF2 targeting peptide, a nucleic acid encoding an alpha-glucosidase (GAA) polypeptide, a 3′ ITR sequence, a poly A sequence, and a 3′ ITR.
[0611] 46. The recombinant AAV vector of any of paragraphs 34-37, wherein the secretory signal peptide is selected from nucleic acid encoding a secretory signal peptide, can be selected from an AAT signal peptide (e.g., SEQ ID NO: 17), a fibronectin signal peptide (FN1) (e.g., SEQ ID NO: 18-21), a cognate GAA signal peptide (SEQ ID NO: 175), an hIGF2 signal peptide (e.g., SEQ ID NO: 22), a IgG1 leader peptide (SEQ ID NO: 177), wtIL2 leader peptide (SEQ ID NO: 179), mutant IL2 leader peptide (SEQ ID NO: 181) or an active fragment thereof having secretory signal activity, e.g., a nucleic acid encoding an amino acid sequence that has at least about 75%, or 80%, or 85%, or 90%, or 95%, or 98%, or 99% sequence identity to SEQ ID NOs: 17-22, 175, 177, 179 or 181.
[0612] 47. The recombinant AAV vector of any of paragraphs 38-46, wherein the IGF2 targeting peptide binds human cation-independent mannose-6-phosphate receptor (CI-MPR) or the IGF2 receptor.
[0613] 48. The recombinant AAV vector of any of paragraphs 38-47, wherein the IGF2 targeting peptide comprises SEQ ID NO: 5 or comprises at least one amino modification in SEQ ID NO: 5 that does not affect binding to the IGF2 receptor or reduces its binding to one or more of IGF Binding proteins IGFBP1-6.
[0614] 49. The recombinant AAV vector of paragraph 48, wherein the at least one amino modification in SEQ ID NO: 5 is a V43M amino acid modification (SEQ ID NO: 8 or SEQ ID NO: 9) or Δ2-7 (SEQ ID NO: 6) or Δ1-7 (SEQ ID NO: 7).
[0615] 50. The recombinant AAV vector of any of paragraphs 38-49, wherein the liver specific promoter is selected from any of the sequences listed in Table 4, or Table 4A or 4B provisional application 62,937,556, filed on Nov. 19, 2019, or a functional variant or functional fragment thereof.
[0616] 51. The recombinant AAV vector of any of paragraphs 38-50, wherein the liver specific promoter is selected from any of: CRM_SP0412 (SEQ ID NO: 86) or SP0412 (SEQ ID NO: 91) or a functional variant or functional fragment thereof having at least 60% activity to SEQ ID NO: 86 or SEQ ID NO: 91.
[0617] 52. The recombinant AAV vector of any of paragraphs 38-50, wherein the liver specific promoter is selected from any of: (i) SP0422 (SEQ ID NO: 92) or a functional variant or functional fragment thereof having at least 60% activity to SEQ ID NO: 92; (ii) CRM_SP0239 (SEQ ID NO: 87) or SP0239 (SEQ ID NO: 93) or SP0238-UTR (SEQ ID NO: 147) or a functional variant or functional fragment thereof having at least 60% activity to SEQ ID NO: 87, SEQ ID NO: 93 or SEQ ID NO: 147; (iii) CRM_SP0265 (SP0131_A1) (SEQ ID NO: 88) or SP0265 (LVR_SP0131 A1) (SEQ ID NO: 94) or SP0265-UTR (SEQ ID NO: 146) or a functional variant or functional fragment thereof having at least 60% activity to SEQ ID NO: 88, SEQ ID NO: 94 or SEQ ID NO: 146; (iv) CRM_SP0240 (SEQ ID NO: 89) or SP0240 (SEQ ID NO: 95) or SP0240-UTR (SEQ ID NO: 148) or a functional variant or functional fragment thereof having at least 60% activity to SEQ ID NO: 89, SEQ ID NO: 95 or SEQ ID NO: 148; (v) CRM_SP0246 (SEQ ID NO: 90) or SP0246 (SEQ ID NO: 96) or SP0246-UTR (SEQ ID NO: 149) or a functional variant or functional fragment thereof having at least 60% activity to SEQ ID NO: 90, SEQ ID NO: 96 or SEQ ID NO: 149.
[0618] 53. The recombinant AAV vector of paragraphs 38-52, wherein the nucleic acid sequence encodes a wild-type GAA polypeptide or a modified GAA polypeptide.
[0619] 54. The recombinant AAV vector of any of paragraphs 38-53, wherein the nucleic acid sequence encoding the GAA polypeptide is the human GAA gene or a human codon optimized GAA gene (coGAA) or a modified GAA nucleic acid sequence.
[0620] 55. The recombinant AAV vector of any of paragraphs 38-54, wherein the nucleic acid sequence encoding the GAA polypeptide is codon optimized for enhanced expression in vivo.
[0621] 56. The recombinant AAV vector of any of paragraphs 38-55, wherein the nucleic acid sequence encoding the GAA polypeptide is codon optimized to reduce CpG islands.
[0622] 57. The recombinant AAV vector of any of paragraphs 38-56, wherein the nucleic acid sequence encoding the GAA polypeptide is codon optimized to reduce the innate immune response, or reduce the CpG islands, or reduce the innate immune response and reduce the CpG islands.
[0623] 58. The recombinant AAV vector of any of paragraphs 38-57, wherein the nucleic acid sequence encoding the GAA polypeptide encodes a GAA polypeptide comprising at least one, at least 2 or at least all three amino acid modifications selected from; H201L, H199R or R233H of SEQ ID NO: 10.
[0624] 59. The recombinant AAV vector any of paragraphs 38-58, wherein the intron sequence is selected from any of the MVM, HBB2 or SV40 intron sequence, wherein the MVM sequence comprises the nucleic acid sequence of SEQ ID NO: 13, or a nucleic acid sequence at least about 75%, or 80%, or 85%, or 90%, or 95%, or 98%, or 99% sequence identity to SEQ ID NO: 13, and the HBB2 sequence comprises the nucleic acid sequence of SEQ ID NO: 14, or a nucleic acid sequence at least about 75%, or 80%, or 85%, or 90%, or 95%, or 98%, or 99% sequence identity to SEQ ID NO: 14.
[0625] 60. The recombinant AAV vector any of paragraphs 38-59, wherein the ITR comprises an insertion, deletion or substitution.
[0626] 61. The recombinant AAV vector of paragraph 60, wherein one or more CpG islands in the ITR are removed.
[0627] 62. The recombinant AAV vector of any of paragraphs 38-61, wherein the 3′ ITR comprises or consist of SEQ ID NO: 442, or a nucleotide sequence that is at least 80% identical, e.g., at least 85%, 90%, 95%, 96%, 97%, 98%, or 99% or 99.5% identical to SEQ ID NO: 442, and the 5′ ITR comprises, or consists of SEQ ID NO: 441 or a nucleotide sequence that is at least 80% identical, e.g., at least 85%, 90%, 95%, 96%, 97%, 98%, or 99% or 99.5% identical to SEQ ID NO: 441.
[0628] 63. The recombinant AAV vector of any of paragraphs 38-61, wherein the 3′ ITR comprises or consist of SEQ ID NO: 165, or a nucleotide sequence that is at least 80% identical, e.g., at least 85%, 90%, 95%, 96%, 97%, 98%, or 99% or 99.5% identical to SEQ ID NO: 165, and the 5′ ITR comprises, or consists of SEQ ID NO: 161 or a nucleotide sequence that is at least 80% identical, e.g., at least 85%, 90%, 95%, 96%, 97%, 98%, or 99% or 99.5% identical to SEQ ID NO: 161.
[0629] 64. The recombinant AAV vector of any of paragraphs 38-63, wherein the secretory signal peptide is a fibronectin signal peptide (FN1) or an active fragment thereof having secretory signal activity, (e.g., a FN1 signal peptide has the sequence of any of SEQ ID NO: 18-21, or an amino acid sequence at having at least about 75%, or 80%, or 85%, or 90%, or 95%, or 98%, or 99% sequence identity to any of SEQ ID NOs: 18-21), and the heterologous nucleic acid sequence encodes a IGF2 targeting peptide selected from any of: SEQ ID NO: 5, SEQ ID NO: 6, SEQ ID NO: 7, SEQ ID NO: 8 or SEQ ID NO: 9, or a IGF2 peptide having at least about 75%, or 80%, or 85%, or 90%, or 95%, or 98%, or 99% sequence identity to SEQ ID NOs: 5-9.
[0630] 65. The recombinant AAV vector of any of paragraphs 38-64, wherein the encoded secretory signal peptide is AAT signal peptide or an active fragment thereof having secretory signal activity, (e.g., a AAT signal peptide has the sequence of SEQ ID NO: 17, or an amino acid sequence at having at least about 75%, or 80%, or 85%, or 90%, or 95%, or 98%, or 99% sequence identity to SEQ ID NO: 17), and the heterologous nucleic acid sequence encodes a IGF2 targeting peptide selected from any of: SEQ ID NO: 5, SEQ ID NO: 6, SEQ ID NO: 7, SEQ ID NO: 8 or SEQ ID NO: 9, or a IGF2 peptide having at least about 75%, or 80%, or 85%, or 90%, or 95%, or 98%, or 99% sequence identity to SEQ ID NOs: 5-9.
[0631] 66. The recombinant AAV vector of any of paragraphs 38-65, wherein the IGF2 targeting peptide is SEQ ID NO: 8 or SEQ ID NO: 9, or a IGF2 peptide having at least about 75%, or 80%, or 85%, or 90%, or 95%, or 98%, or 99% sequence identity to SEQ ID NO: 8 or 9.
[0632] 67. The recombinant AAV vector of any of paragraphs 38-66, wherein the liver specific promoter is CRM_SP0412 (SEQ ID NO: 86) or SP0412 (SEQ ID NO: 91) or a functional variant or functional fragment thereof having at least 60% activity to SEQ ID NO: 86 or SEQ ID NO: 91.
[0633] 68. The recombinant AAV vector of any of paragraphs 38-66, wherein the liver specific promoter is SP0422 (SEQ ID NO: 92) or a functional variant or functional fragment thereof having at least 60% activity to SEQ ID NO: 92.
[0634] 69. The recombinant AAV vector of any of paragraphs 38-66, wherein the liver specific promoter is CRM_SP0239 (SEQ ID NO: 87) or SP0239 (SEQ ID NO: 93) or SP0238-UTR (SEQ ID NO: 147) or a functional variant or functional fragment thereof having at least 60% activity to SEQ ID NO: 87, SEQ ID NO: 93 or SEQ ID NO: 147.
[0635] 70. The recombinant AAV vector of any of paragraphs 38-66, wherein the liver specific promoter is CRM_SP0265 (SP0131_A1) (SEQ ID NO: 88) or SP0265 (LVR_SP0131_A1) (SEQ ID NO: 94) or SP0265-UTR (SEQ ID NO: 146) or a functional variant or functional fragment thereof having at least 60% activity to SEQ ID NO: 88, SEQ ID NO: 94 or SEQ ID NO: 146.
[0636] 71. The recombinant AAV vector of any of paragraphs 38-66, wherein the liver specific promoter is CRM_SP0240 (SEQ ID NO: 89) or SP0240 (SEQ ID NO: 95) or SP0240-UTR (SEQ ID NO: 148) or a functional variant or functional fragment thereof having at least 60% activity to SEQ ID NO: 89, SEQ ID NO: 95 or SEQ ID NO: 148.
[0637] 72. The recombinant AAV vector of any paragraphs 38-66, wherein the liver specific promoter is CRM_SP0246 (SEQ ID NO: 90) or SP0246 (SEQ ID NO: 96) or SP0246-UTR (SEQ ID NO: 149) or a functional variant or functional fragment thereof having at least 60% activity to SEQ ID NO: 90, SEQ ID NO: 96 or SEQ ID NO: 149
[0638] 73. A pharmaceutical composition comprising the recombinant AAV vector of any one of the previous paragraphs in a pharmaceutically acceptable carrier.
[0639] 74. A nucleic acid sequence comprising:
   [0640] a liver specific promoter operatively linked to a heterologous nucleic acid sequence, the heterologous nucleic acid sequence encoding a GAA polypeptide, wherein the liver specific promoter is selected from any one of the sequences disclosed in Table 4, or Table 4A or 4B of U.S. provisional application 62,937,556, filed on Nov. 19, 2019, or a functional variant or functional fragment thereof.
[0641] 75. The nucleic acid sequence of paragraph 74, wherein the heterologous nucleic acid sequence comprises in the following order: a nucleic acid encoding a secretory signal peptide, and a nucleic acid encoding a GAA polypeptide.
[0642] 76. The nucleic acid sequence of paragraph 74, wherein the heterologous nucleic acid sequence comprises in the following order: a nucleic acid encoding a secretory signal peptide, a nucleic acid encoding a IGF2 targeting peptide and a nucleic acid encoding a GAA polypeptide.
[0643] 77. A nucleic acid sequence for a recombinant adenovirus associated (rAAV) vector genome comprising:
   [0644] a. 5′ and 3′ AAV inverted terminal repeats (ITR) nucleic acid sequences, and
   [0645] b. located between the 5′ and 3′ ITR sequence, a heterologous nucleic acid sequence encoding a polypeptide comprising an alpha-glucosidase (GAA) polypeptide, wherein the heterologous nucleic acid is operatively linked to a liver-specific promoter, wherein the liver specific promoter is selected from any one of the sequences disclosed in Table 4, or Table 4A or 4B of U.S. provisional application 62,937,556, filed on Nov. 19, 2019, or a functional variant or functional fragment thereof.
[0646] 78. A nucleic acid sequence of paragraph 75, wherein the nucleic acid sequence encodes a fusion polypeptide comprising a secretory signal and an alpha-glucosidase (GAA) polypeptide.
[0647] 79. A nucleic acid sequence of paragraph 75, wherein the nucleic acid sequence encodes a fusion polypeptide comprising a secretory signal, an IGF2 targeting peptide and an alpha-glucosidase (GAA) polypeptide.
[0648] 80. A nucleic acid sequence comprising:
   [0649] a liver specific promoter operatively linked to a heterologous nucleic acid sequence comprising, a nucleic acid encoding a GAA polypeptide, wherein the liver specific promoter is selected from any of:
   [0650] i. CRM_SP0412 (SEQ ID NO: 86) or SP0412 (SEQ ID NO: 91) or a functional variant or functional fragment thereof having at least 60% activity to SEQ ID NO: 86 or SEQ ID NO: 91,
   [0651] ii. SP0422 (SEQ ID NO: 92) or a functional variant or functional fragment thereof having at least 60% activity to SEQ ID NO: 92,
   [0652] iii. CRM_SP0239 (SEQ ID NO: 87) or SP0239 (SEQ ID NO: 93) or SP0238-UTR (SEQ ID NO: 147) or a functional variant or functional fragment thereof having at least 60% activity to SEQ ID NO: 87, SEQ ID NO: 93 or SEQ ID NO: 147;
   [0653] iv. CRM_SP0265 (SP0131_A1) (SEQ ID NO: 88) or SP0265 (LVR_SP0131_A1) (SEQ ID NO: 94) or SP0265-UTR (SEQ ID NO: 146) or a functional variant or functional fragment thereof having at least 60% activity to SEQ ID NO: 88, SEQ ID NO: 94 or SEQ ID NO: 146;
   [0654] v. CRM_SP0240 (SEQ ID NO: 89) or SP0240 (SEQ ID NO: 95) or SP0240-UTR (SEQ ID NO: 148) or a functional variant or functional fragment thereof having at least 60% activity to SEQ ID NO: 89, SEQ ID NO: 95 or SEQ ID NO: 148; or
   [0655] vi. CRM_SP0246 (SEQ ID NO: 90) or SP0246 (SEQ ID NO: 96) or SP0246-UTR (SEQ ID NO: 149) or a functional variant or functional fragment thereof having at least 60% activity to SEQ ID NO: 90, SEQ ID NO: 96 or SEQ ID NO: 149.
[0656] 81. A nucleic acid sequence of paragraph 80, wherein the heterologous nucleic acid sequence comprises in the following order: a nucleic acid encoding a secretory signal and nucleic acid encoding an alpha-glucosidase (GAA) polypeptide.
[0657] 82. A nucleic acid sequence of paragraph 75, wherein the heterologous nucleic acid sequence comprises in the following order: a nucleic acid encoding a secretory signal, a nucleic acid sequence encoding an IGF2 targeting peptide and nucleic acid encoding an alpha-glucosidase (GAA) polypeptide.
[0658] 83. A nucleic acid sequence for a recombinant adenovirus associated (rAAV) vector genome comprising: (a) 5′ and 3′ AAV inverted terminal repeats (ITR) nucleic acid sequences, and (b) located between the 5′ and 3′ ITR sequence, a heterologous nucleic acid sequence encoding an alpha-glucosidase (GAA) polypeptide, or encoding a fusion polypeptide comprising a secretory signal peptide and an alpha-glucosidase (GAA) polypeptide, wherein the heterologous nucleic acid is operatively linked to a liver-specific promoter, wherein the liver specific promoter is selected from any one of:
   [0659] i. CRM_SP0412 (SEQ ID NO: 86) or SP0412 (SEQ ID NO: 91) or a functional variant or functional fragment thereof having at least 60% activity to SEQ ID NO: 86 or SEQ ID NO: 91,
   [0660] ii. SP0422 (SEQ ID NO: 92) or a functional variant or functional fragment thereof having at least 60% activity to SEQ ID NO: 92,
   [0661] iii. CRM_SP0239 (SEQ ID NO: 87) or SP0239 (SEQ ID NO: 93) or SP0238-UTR (SEQ ID NO: 147) or a functional variant or functional fragment thereof having at least 60% activity to SEQ ID NO: 87, SEQ ID NO: 93 or SEQ ID NO: 147;
   [0662] iv. CRM_SP0265 (SP0131_A1) (SEQ ID NO: 88) or SP0265 (LVR_SP0131_A1) (SEQ ID NO: 94) or SP0265-UTR (SEQ ID NO: 146) or a functional variant or functional fragment thereof having at least 60% activity to SEQ ID NO: 88, SEQ ID NO: 94 or SEQ ID NO: 146;
   [0663] v. CRM_SP0240 (SEQ ID NO: 89) or SP0240 (SEQ ID NO: 95) or SP0240-UTR (SEQ ID NO: 148) or a functional variant or functional fragment thereof having at least 60% activity to SEQ ID NO: 89, SEQ ID NO: 95 or SEQ ID NO: 148; or
   [0664] vi. CRM_SP0246 (SEQ ID NO: 90) or SP0246 (SEQ ID NO: 96) or SP0246-UTR (SEQ ID NO: 149) or a functional variant or functional fragment thereof having at least 60% activity to SEQ ID NO: 90, SEQ ID NO: 96 or SEQ ID NO: 149.
[0665] 84. The nucleic acid sequence of any of paragraphs 74-83, wherein the heterologous nucleic acid sequence encoding the GAA polypeptide, or the fusion polypeptide further comprises a IGF2 targeting peptide located between the secretory signal peptide and the an alpha-glucosidase (GAA) polypeptide.
[0666] 85. The nucleic acid sequence of any of paragraphs 74-84, wherein the nucleic acid encoding the secretory signal is selected from any of SEQ ID NO: 17, 22-26, 175, 177, 179 or 1810r a nucleic acid sequence at least about 75%, or 80%, or 85%, or 90%, or 95%, or 98%, or 99% sequence identity to any of SEQ ID NOs: 17 or 22-26, or 175, 177, 179 or 181.
[0667] 86. The nucleic acid sequence of any of paragraphs 74-85, wherein the nucleic acid encoding the IGF2 targeting peptide is selected from any of SEQ ID NO: 2 (IGF2-Δ2-7), SEQ ID NO: 3 (IGF2-A1-7), or SEQ ID NO: 4 (IGF2 V43M), or a nucleic acid sequence at least about 75%, or 80%, or 85%, or 90%, or 95%, or 98%, or 99% sequence identity to any of SEQ ID NOs: 2, 3 or 4.
[0668] 87. The nucleic acid sequence of any of paragraphs 74-86, wherein the nucleic acid sequence encoding the GAA polypeptide is the human GAA gene or a human codon optimized GAA gene (coGAA) or a modified GAA nucleic acid sequence.
[0669] 88. The nucleic acid sequence of any of paragraphs 74-87, wherein the nucleic acid sequence encoding the GAA polypeptide is codon optimized for enhanced expression in vivo.
[0670] 89. The nucleic acid sequence of any of paragraphs 74-88, wherein the nucleic acid sequence encoding the GAA polypeptide is codon optimized to reduce CpG islands.
[0671] 90. The nucleic acid sequence of any of paragraphs 74-89, wherein the nucleic acid sequence encoding the GAA polypeptide is codon optimized to reduce the innate immune response, or reduce the CpG islands, or to reduce the innate immune response and reduce the CpG islands.
[0672] 91. The nucleic acid sequence of any of paragraphs 74-90, wherein the nucleic acid sequence encoding the GAA polypeptide encodes a GAA polypeptide comprising a H201L modification of SEQ ID NO: 10.
[0673] 92. The nucleic acid sequence of any of paragraphs 74-91, wherein the nucleic acid encoding the GAA polypeptide is selected from any of SEQ ID NO: 11 (full length hGAA), SEQ ID NO: 55 (Dwight cDNA), SEQ ID NO: 56 (hGAA Δ1-66) or a nucleic acid sequence at least about 75%, or 80%, or 85%, or 90%, or 95%, or 98%, or 99% sequence identity to any of SEQ ID NOs: 11, 55 or 56.
[0674] 93. The nucleic acid sequence of paragraph 74-92, wherein the nucleic acid encoding the GAA polypeptide is selected from any of SEQ ID NO: 74 (codon optimized 1), SEQ ID NO: 75 (codon optimized 2), and SEQ ID NO: 76 (codon optimized 3), or a nucleic acid sequence at least about 75%, or 80%, or 85%, or 90%, or 95%, or 98%, or 99% sequence identity to any of SEQ ID NOs: 74, 75 or 76.
[0675] 94. The nucleic acid sequence of paragraph 74-93, wherein the nucleic acid is selected from any of: SEQ ID NO: 57 (AAT-V43M-wtGAA (delta1-69aa)); SEQ ID NO: 58 (ratFN1-IGF2V43M-wtGAA (delta1-69aa)); SEQ ID NO: 59 (hFN1-IGF2V43M-wtGAA (delta1-69aa)); SEQ ID NO: 60 (AAT-IGF2-Δ2-7-wtGAA (delta 1-69)); SEQ ID NO: 61 (FN1rat-IGFΔ2-7-wtGAA (delta 1-69)); SEQ ID NO: 62 (hFN1-IGFΔ2-7-wtGAA (delta 1-69)), SEQ ID NO: 79 (AAT_hIGF2-V43M_wtGAA_del1-69_Stuffer.V02); SEQ ID NO: 80 (FIBrat_hIGF2-V43M_wtGAA_del1-69_Stuffer.V02); SEQ ID NO: 81 (FIBhum_hIGF2-V43M_wtGAA_del1-69_Stuffer.V02); SEQ ID NO: 82 (AAT_GILT_wtGAA_del1-69__Stuffer.V02); SEQ ID NO: 83 (FIBrat_GILT_wtGAA_del1-69_Stuffer.V02); SEQ ID NO: 84 (FIBhum_GILT_wtGAA_del1-69_Stuffer.V02) or a nucleic acid sequence having at least 80%, 85%, 90%, 95% or 98% identity to SEQ ID Nos: 57, 58, 59, 60, 61, 62, 79, 80, 81, 82, 83 or 84.
[0676] 95. A method to treat a subject with a glycogen storage disease type II (GSD II, Pompe Disease, Acid Maltase Deficiency) or having a deficiency in alpha-glucosidase (GAA) polypeptide, comprising administering any of the recombinant AAV vector, or the rAAV genome or the nucleic acid sequence of any one of the previous paragraphs 1-95 to the subject.
[0677] 96. The method of paragraph 95, wherein GAA polypeptide is secreted from the subject's liver and there is uptake of the secreted GAA by skeletal muscle tissue, cardiac muscle tissue, diaphragm muscle tissue or a combination thereof, wherein uptake of the secreted GAA results in a reduction in lysosomal glycogen stores in the tissue(s).
[0678] 97. The method of any of paragraphs 95-96, wherein the administering to the subject is selected from any of: intramuscular, sub-cutaneous, intraspinal, intracisternal, intrathecal, intravenous administration.
[0679] 98. The method of any of paragraphs 95-97, wherein the recombinant AAV vector is a chimeric AAV vector, haploid AAV vector, a hybrid AAV vector or polyploid AAV vector.
[0680] 99. The method of any of paragraphs 95-97, wherein the recombinant AAV vector is a rational haploid vector, a mosaic AAV vector, a chemically modified AAV vector, or a AAV vector from any AAV serotypes.
[0681] 100. The method of any of paragraphs 95-97, wherein the recombinant AAV vector is a AAVXL32 vector or a AAVXL32.1 vector or a AAV8 vector, or a haploid AAV8 vector comprising at least one AAV8 capsid protein.
[0682] 101. The method of paragraph 100, wherein the recombinant AAV vector is a AAV8 vector.
[0683] 102. A method to treat a subject with a lysosomal storage disease (LSD), comprising administering any of: the recombinant AAV vector, or the rAAV genome or the nucleic acid sequences of any one of the previous paragraphs to the subject, wherein the AAV vector expresses a polypeptide selected from any polypeptide in Table 5B or Table 6B.
[0684] 103. The method of paragraph 102, wherein the lysosomal storage disease (LSD) is selected from any of those listed in Table 5A or Table 6A.
[0685] 104. The method of paragraph 102, wherein the recombinant AAV vector is a chimeric AAV vector, haploid AAV vector, a hybrid AAV vector or polyploid AAV vector.
[0686] 105. The method of paragraph 102, wherein the recombinant AAV vector is a rational haploid vector, a mosaic AAV vector, a chemically modified AAV vector, or a AAV vector from any AAV serotypes.
[0687] 106. The method of paragraph 102, wherein the recombinant AAV vector is a AAVXL32 vector or a AAVXL32.1 vector or a AAV8 vector, or a haploid AAV8 vector comprising at least one AAV8 capsid protein.
[0688] 107. A cell comprising the nucleic acid sequence of any of paragraphs 74-94.
[0689] 108. The cell of paragraph 107, wherein the cell is a human cell.
[0690] 109. The cell of any of paragraphs 107-108, wherein the cell is a non-human cell mammalian cell.
[0691] 110. The cell of any of paragraphs 107-109, wherein the cell is an insect cell.
[0692] 111. A cell comprising the recombinant AAV vector of any of paragraphs 1-72.
[0693] 112. A host animal comprising the recombinant AAV vector of any of paragraphs 1-72.
[0694] 113. The host animal of paragraph 112, wherein the host animal is a mammal.
[0695] 114. The host animal of paragraph 112 or 113, wherein the host animal is a non-human mammal.
[0696] 115. The host animal of paragraph 113, wherein the host animal is a human.
[0697] 116. The pharmaceutical composition of paragraph 73, for use in the method of any of paragraphs 95-101.
[0698] 117. A host animal comprising a cell of any of paragraphs 107-111.
[0699] 118. A host animal comprising the recombinant AAV vector of any of paragraphs 1-72.
[0700] 119. The host animal of paragraph 118, wherein the host animal is a mammal.
[0701] 120. The host animal of paragraph 118-119, wherein the host animal is a non-human mammal.
[0702] 121. The host animal of paragraph 119, wherein the host animal is a human.

### Examples

[0703] The following non-limiting examples are provided for illustrative purposes only in order to facilitate a more complete understanding of representative embodiments now contemplated. These examples are intended to be a mere subset of all possible contexts in which the AAV virions and rAAV vectors may be utilized. Thus, these examples should not be construed to limit any of the embodiments described in the present specification, including those pertaining to AAV virions and rAAV vectors and/or methods and uses thereof. Ultimately, the AAV virions and vectors may be utilized in virtually any context where gene delivery is desired.

### Example 1: Construction of the rAAV Genome

[0704] Numerous rAAV genomes were constructed using Gibson cloning methodology. The following rAAV genomes were generated: AAV_LVR412_EU (SEQ ID NO: 154), ssAAV_LVR412WT-hGAA_AskBio_CHATHAM (SEQ ID NO: 155), AAV-LVR412Stuffer (SEQ ID NO: 156), AAV_LVR422_EU (SEQ ID NO: 157), AAV-LVR422_Stuffer (SEQ ID NO: 158), ssAAV_LVR412_WT-hGAA CHATHAM (SEQ ID NO: 159), ssAAV_LSP_WT-hGAA-CHATHAM (SEQ ID NO: 160), SEQ ID NO: 57 (AAT-V43M-wtGAA (delta1-69aa)); SEQ ID NO: 58 (ratFN1-IGF2V43M-wtGAA (delta1-69aa)); SEQ ID NO: 59 (hFN1-IGF2V43M-wtGAA (delta1-69aa)); SEQ ID NO: 60 (AAT-IGF2-Δ2-7-wtGAA (delta 1-69)); SEQ ID NO: 61 (FN1rat-IGFΔ2-7-wtGAA (delta 1-69)); SEQ ID NO: 62 (hFN1-IGFΔ2-7-wtGAA (delta 1-69)). While some rAAV vectors comprises a nucleic acid sequence encoding the wtGAA polypeptide, one can readily replace the wtGAA with a nucleic acid sequence encoding a modified GAA nucleic acid sequence as disclosed herein.

[0705] Gibson cloning involves cloning blocks (e.g., 3 blocks) of nucleic acid sequences together. The general protocol is as follows: the following reagents are combined into a single-tube reaction (i) Gibson Assembly Master Mix (Exonuclease, DNA polymerase, DNA Ligase, buffer) (ii) DNA inserts (Blocks 1-3) with 15-25 bp of homologous ends (see, FIG. 6) (iii) Linearized DNA backbone with 15-25 bp of homologous ends to the outermost DNA inserts (see, FIG. 6). The reaction is incubated at 50° C. for 15-60 minutes. The reaction mix is transformed into competent cells and plated on Kanamycin agar plates. Minipreps of fully-assembled plasmid DNA are screened via restriction digestion and/or colony PCR analysis and verified by DNA sequencing analysis. Verified clone is expanded for maxiprep production and transiently transfected in a rAAV producer cell line alongside the Adenovirus helper, XX680 Kan, and the appropriate Rep/Cap helper to produce rAAV. FIG. 6 show the cloning nucleic blocks to generate exemplary rAAV genomes.

[0706] While FIGS. 7-9 show wtGAA(A1-69) is an exemplary GAA enzyme, this nucleic acid sequence can easily be replaced by one of ordinary skill with a nucleic acid sequence encoding GAA that has been codon optimized for enhanced expression in vivo, and/or to reduce immune response, and/or to reduce CpG islands, and/or has a H201L modification. Accordingly, while FIG. 9A-9E show exemplary constructs with wild type GAA (wtGAA), one can readily replace the nucleic acid encoding the wtGAA with a nucleic acid sequence encoding a modified GAA nucleic acid sequence as disclosed herein, e.g., SEQ ID NO: 182. Also shown in the cloning blocks exemplified in FIGS. 7-8 is a generation of a rAAV genome a 3 amino acid (3aa) spacer nucleic acid sequence located 3′ of the nucleic acid sequence encoding the IGF2(V43M) or IGF2-Δ2-7 targeting peptide and 5′ of the nucleic acid encoding a GAA enzyme, and a stuffer nucleic acid sequence a stuffer sequence (referred to in FIGS. 7-8 as a “spacer” sequence) which is located 3′ of the polyA sequence and 5′ of the 3′ITR sequence.

### Example 2: Generating rAAV Vectors

[0707] The rAAV genomes were packed into capsids to generate rAAV vectors using a rAAV producing cell line. Solely for proof of principal of rAAV vector construction, the capsids used were AAV3b capsids.

[0708] Making rAAV in the rAAV producing cell line: triple transfection technique was used to make rAAV in a suspension rAAV producer cell line, which can be scaled up for making clinical grade vector. Alternatively, different plasmids can be used, e.g., 1) pXX680-ad helper and 2) pXR3 the Rep and Cap 3) and the Transgene plasmid (ITR-transgene-ITR).

[0709] The rAAV genomes generated in Example 1 are used to generate rAVV vectors using a rAAV producing cell line, according to the methods as described in U.S. Pat. No. 9,441,206, which is incorporated herein in its entirety by reference. In particular, rAAV vectors or rAAV virions are produced using a method comprising: (a) providing a rAAV producing cell line an AAV expression system; (b) culturing the cells under conditions in which AAV particles are produced; and (c) optionally isolating the AAV particles. Ratios of triple transfection of the plasmid and transfection cocktail volumes can be optimized, with varying plasmid ratios of XX680, AAV rep/cap helper and TR plasmid to determine the optimal plasmid ratio for rAAV vector production.

[0710] In some instances, the cells are cultured in suspension under conditions in which AAV particles are produced. In another embodiment, the cells are cultured in animal component-free conditions. The animal component-free medium can be any animal component-free medium (e.g., serum-free medium) compatible with the rAAV producer cell line. Examples include, without limitation, SFM4Transfx-293 (Hyclone), Ex-Cell 293 (JRH Biosciences), LC-SFM (Invitrogen), and Pro293-S(Lonza). Conditions sufficient for the replication and packaging of the AAV particles can be, e.g., the presence of AAV sequences sufficient for replication of an rAAV genome described herein and encapsidation into AAV capsids (e.g., AAV rep sequences and AAV cap sequences) and helper sequences from adenovirus and/or herpesvirus.

[0711] Bacterial DNA sequences from the plasmid backbone can be packaged into AAV capsids during manufacturing of the recombinant AAV vectors leading to activations of the innate immune system through its interaction with TLR9 (Akira, 2006; Chadeuf, 2005; Wright, 2014). Various technologies can be used to eliminate plasmid backbone sequences in recombinant AAV preparations, for example minicircles which have limited scalability (Schnodt, 2016). Another method to avoid bacterial DNA sequence in the plasmid backbone is to use closed ended linear duplex DNA, which includes a range of DNA replication technology, including but not limited to doggy bone DNA (dbDNA™) for specifically manufacturing of recombinant AAV vectors. Using closed ended linear duplex DNA, such as dbDNA™ eliminates the bacterial backbone and has been used to produce vaccines and lentivirus (Walters et al, 2014; Scott et al, 2015; Karda et al, 2019) and was shown to be unable to trigger TLR9 responses by DNA vaccine developers.

[0712] Accordingly, in alternative embodiments, generation of rAAV vectors for use in the methods and compositions as disclosed herein can be performed using closed ended linear duplex DNA, including but not limited to Doggybone technology (dbDNA™), as disclosed in US Application 2018/0037943 and Karbowniczek et al., Bioinsights, 2017, which is incorporated herein in its entirety by reference. In brief, a plasmid for AAV production using a closed ended linear duplex DNA technology can comprise the ITRs, promoter and gene of interest, e.g., GAA as disclosed herein, is flanked by a 56 bp palindromic protelomerase recognition sequence. The plasmid is denatured, and in the presence of a Phi29 DNA polymerase, and appropriate primers, Phi29 initiates rolling circle amplification (RCA), creating a double stranded cancatameric repeats of the original construct. When protelomerase is added, binding of the palindromic protelomerase recognition sequences occurs and cleavage-joining reaction occurs to result in a monomeric double stranded (ds) linear covalently closed DNA construct. Addition of common restriction enzymes remove the undesired DNA plasmid backbone sequence and digestion with exonuclease activity, resulting in dbDNA which can be size fractionated to isolate the dbDNA sequence encoding the ITRs, promoter and gene of interest. An exemplary plasmid for generation of rAAV vectors using closed ended linear duplex DNA such as dbDNA™ technology, comprises in the following 5′ to 3′ direction: 5′-protelomerase RS, 5′ITR, LSP promoter, hGAA, 3′UTR, hGH poly(A), 3′ ITR, 3′-protelomerase RS (sense strand), where the sense strand is linked to the complementary antisense strand for a stranded (ds) linear covalently closed DNA construct. The use of closed ended linear duplex DNA, e.g., doggy bone DNA (dbDNA™) as a starting material for the manufacturing of an AAV vector for use in the methods and composition as disclosed herein eliminates the bacterial backbone used to propagate the plasmid containing AAV vector with an inability for the product to trigger Toll-like receptor 9 (TLR9) responses. Use of closed ended linear duplex DNA technology for manufacturing further reduce the risk for liver enzyme elevations observed at a dose of 1.6E13 vg/kg in patients with Pompe disease.

### Example 3: Assessing rAAV Vectors

[0713] Whole Blood Clearance. FIG. 1 shows the results derived from an experiment where 3×10¹² vg/kg of different AAV serotypes (AAV3b, AAV3ST, AAV8, AAV9) were injected intravenously into 3 kg seronegative male macaques. The macaques were euthananized 60 days post administration of the different AAV serotypes. Vector genomes were searched in whole blood and results indicated that AAV3b was cleared within a week and was undetectable at sacrifice, whereas AAV8 and AAV9 were still detectable in whole blood when the macaques were sacrificed.

[0714] Liver Specific Vector Potency: FIG. 2 shows the results derived from an experiment where 3×10¹² vg/kg of different AAV serotypes (AAV3b, AAV3ST, AAV8, AAV9) were injected intravenously into 3 kg seronegative male macaques. The macaques were euthananized 60 days post administration of the different AAV serotypes. Vector genomes were quantified in each of the three lobes of the liver from each of the macaques. The limit of quantitation was 0.002 vg/dg. Based on the results presented in FIG. 2, AAV3b was found to be a potent liver vector. AAV3b is more liver specific than AAV8 and cleared from the blood more rapidly than AAV9. The AAV3ST mutant did not provide any significant beneficial affect.

### Example 4: Measuring Secretion of GAA into the Supernatant and GAA Uptake Assays

[0715] Measuring GAA in Supernatant.

[0716] Accordingly, the rAAV genomes generated in Example 1 are tested for secretion of GAA polypeptide into the supernatant. Measurement of GAA in the supernatant can be assessed using a 4-methyl-umbelliferyl-alpha-D-glucoside (4-MU) substrate (4-MU assay), as described in Kikuchi et al. (Kikuchi, Tateki, et al. “Clinical and metabolic correction of Pompe disease by enzyme therapy in acid maltase-deficient quail.” The Journal of clinical investigation 101.4 (1998): 827-833.).

[0717] In brief, a rAAV producer cell line can be transfected with rAAV genomes AAV_LVR412_EU (SEQ ID NO: 154), ssAAV_LVR412WT-hGAA_AskBio_CHATHAM (SEQ ID NO: 155), AAV-LVR412Stuffer (SEQ ID NO: 156), AAV_LVR422_EU (SEQ ID NO: 157), AAV-LVR422_Stuffer (SEQ ID NO: 158), ssAAV_LVR412_WT-hGAA CHATHAM (SEQ ID NO: 159), ssAAV_LSP_WT-hGAA-CHATHAM (SEQ ID NO: 160), SEQ ID NO: 57 (AAT-V43M-wtGAA (delta1-69aa)); SEQ ID NO: 58 (ratFN1-IGF2V43M-wtGAA (delta1-69aa)); SEQ ID NO: 59 (hFN1-IGF2V43M-wtGAA (delta1-69aa)); SEQ ID NO: 60 (AAT-IGF2-Δ2-7-wtGAA (delta 1-69)); SEQ ID NO: 61 (FN1rat-IGFΔ2-7-wtGAA (delta 1-69)); SEQ ID NO: 62 (hFN1-IGFΔ2-7-wtGAA (delta 1-69)). GAA activity is measured based on the % of initial activity (t=0) over 24 hours. Samples were assayed for GAA enzyme activity based on the hydrolysis of the fluorogenic substrate 4-MU-α-glucose at 0, 3, 6 and 24 hours. The GAA activity was expressed as % of initial activity, i.e. residual activity.

[0718] Alternatively, after harvest, culture supernatants were partially purified by HIC chromatography. All samples were treated with PNGase prior to electrophoresis. The expression of GAA polypeptides by the cells can be assessed using SDS-PAGE and immunoblotting.

[0719] GAA Uptake Assays & Measuring Uptake of GAA in Tissues.

[0720] Next, the rAAV genomes generated in Examples 1 and 2 are tested for retention of uptake activity into cells. For example, a rAAV producer cell line can be transfected with rAAV genomes AAV_LVR412_EU (SEQ ID NO: 154), ssAAV_LVR412WT-hGAA_AskBio_CHATHAM (SEQ ID NO: 155), AAV-LVR412Stuffer (SEQ ID NO: 156), AAV_LVR422_EU (SEQ ID NO: 157), AAV-LVR422_Stuffer (SEQ ID NO: 158), ssAAV_LVR412_WT-hGAA CHATHAM (SEQ ID NO: 159), ssAAV_LSP_WT-hGAA-CHATHAM (SEQ ID NO: 160), SEQ ID NO: 57 (AAT-V43M-wtGAA (delta1-69aa)); SEQ ID NO: 58 (ratFN1-IGF2V43M-wtGAA (delta1-69aa)); SEQ ID NO: 59 (hFN1-IGF2V43M-wtGAA (delta1-69aa)); SEQ ID NO: 60 (AAT-IGF2-Δ2-7-wtGAA (delta 1-69)); SEQ ID NO: 61 (FN1rat-IGFΔ2-7-wtGAA (delta 1-69)); SEQ ID NO: 62 (hFN1-IGFΔ2-7-wtGAA (delta 1-69)).

[0721] A 4-MU assay (as described above) can be to assess uptake of rhGAA into mammalian cells is described in US patent Application US2009/0117091A1, which is incorporated herein in its entirety by reference. rAAV vectors or rAAV genomes generated in Examples 1 and 2 are incubated in 20 μl reaction mixtures containing 123 mM sodium acetate pH 4.0 with 10 mM 4-methylumbelliferyl α-D-glucosidase substrate (Sigma, catalog #M-9766). Reactions were incubated at 37° C. for 1 hour and stopped with 200 μl of buffer containing 267 mM sodium carbonate, 427 mM glycine, pH 10.7. Fluorescence was measured with 355 nm excitation and 460 nm filters in 96-well microtiter plates and compared to standard curves derived from 4-methylumbelliferone (Sigma, catalog #M1381). 1 GAA 4 MU unit is defined as 1 nmole 4-methylumbelliferone hydrolyzed/hour. Specific activities of exemplary rAAV genomes in fibroblast cells are assessed, e.g., AAV_LVR412_EU (SEQ ID NO: 154), ssAAV_LVR412WT-hGAA_AskBio_CHATHAM (SEQ ID NO: 155), AAV-LVR412Stuffer (SEQ ID NO: 156), AAV_LVR422_EU (SEQ ID NO: 157), AAV-LVR422_Stuffer (SEQ ID NO: 158), ssAAV_LVR412_WT-hGAA CHATHAM (SEQ ID NO: 159), ssAAV_LSP_WT-hGAA-CHATHAM (SEQ ID NO: 160), SEQ ID NO: 57 (AAT-V43M-wtGAA (delta1-69aa)); SEQ ID NO: 58 (ratFN1-IGF2V43M-wtGAA (delta1-69aa)); SEQ ID NO: 59 (hFN1-IGF2V43M-wtGAA (delta1-69aa)); SEQ ID NO: 60 (AAT-IGF2-Δ2-7-wtGAA (delta 1-69)); SEQ ID NO: 61 (FN1rat-IGFΔ2-7-wtGAA (delta 1-69)); SEQ ID NO: 62 (hFN1-IGFΔ2-7-wtGAA (delta 1-69)). The enzymatic activity of IGF2-GAA fusion polypeptides and/or SS-IGF2-GAA double fusion polypeptide are assessed and compared to a GAA (wtGAA) polypeptide by itself (i.e., without a heterologous signal peptide or IGF2 targeting peptide).

[0722] Cell-based uptake assays can also be performed to demonstrate the ability of IGF2-tagged or untagged GAA to enter the target cell. Rat L6 myoblasts are plated at a density of 1×105 cells per well in 24-well plates 24 hours prior to uptake. At the start of the experiment, media is removed from the cells and replaced with 0.5 ml of uptake media which contains the rAAV vectors generated in Examples 1 and 2. In order to demonstrate specificity of uptake, some wells additionally contained the competitors M6P (5 mM final concentration) and/or IGF2 (18 μg/ml final concentration). After 18 hours, media is aspirated off of cells, and cells are washed 4 times with PBS. Then, cells are lysed with 200 μl CelLytic MTM lysis buffer. The lysate is assayed for GAA activity as described above using the 4 MU substrate. Protein is determined using the Pierce BCA™ Protein Assay Kit.

[0723] A typical uptake experiment is performed in CHO cells, although other cell lines and myoblast cell lines can be used. It is expected that uptake of the GAA polypeptides into Rat L6 myoblasts will be virtually unaffected by the addition of a large molar excess of M6P, whereas uptake is expected to be significantly abolished by excess IGF2. In contrast, it is expected that uptake of wtGAA to be significantly abolished by addition of excess M6P but virtually unaffected by competition with IGF2. In addition, it is expected that uptake of IGF2V43M-wtGAA and IGFdelta2-7wtGAA will be unaffected significantly by excess IGF2.

### Example 5 Half-Life of GAA in Rat L6 Myoblasts

[0724] An uptake experiment was performed as described above (see Example 3 & 4) with the rAAV vectors produced in Example 1 and 2 in rat L6 myoblasts. After 18 hours, media from cells transfected with the rAAV vectors was aspirated off and the cells were washed 4 times with PBS. At this time, duplicate wells were lysed (Time 0) and lysates were frozen at −80. Each day thereafter, duplicate wells were lysed and stored for analysis. After 14 days, all of the lysates were assayed for GAA activity, to assess the half-lives, and assess if, once inside cells, the IGF2-tagged GAA enzyme persists with similar kinetics to untagged GAA.

### Example 6: Processing of GAA after Uptake

[0725] Mammalian GAA typically undergoes sequential proteolytic processing in the lysosome as described by Moreland et al. (2005) J. Biol. Chem., 280:6780-6791 and references contained therein. The processed protein gives rise to a pattern of peptides of 70 kDa, 20 kDa, 10 kDa and some smaller peptides. To determine whether IGF2-GAA fusion polypeptide and/or SS-IGF2-GAA double fusion polypeptide is processed similarly to the untagged GAA, aliquots of lysates from the above uptake experiment were analyzed by Western blot using a monoclonal antibody that recognizes the 70 kDa IGF2 peptide and larger intermediates with the IGF2 tag. A similar profile of polypeptides identified in this experiment indicates that once entering the cell, the IGF2 targeting peptide is lost and the IGF2-GAA polypeptide is processed similarly to untagged GAA, which demonstrates that the IGF2 targeting peptide has little or no impact on the behavior of GAA once it is inside the cell.

### Example 7: Pharmacokinetics

[0726] Pharmacokinetics of IGF2-GAA fusion polypeptide and/or SS-IGF2-GAA double fusion polypeptide produced by the rAAV vectors can be measured in wild-type 129 mice. 129 mice are injected with the rAAV vectors generated in Example 1 and 2. Serum samples are taken preinjection and at 15 min, 30 min, 45 min, 60 min, 90 min, 120 min, 4 hours, and 8 hours post injection. The animals are then sacrificed. Serum samples are assayed by quantitative western blot. The half-lives for the GAA from rAAV vectors expressing IGF2-GAA fusion polypeptide or SS-IGF2-GAA double fusion polypeptide are assessed to determine if the IGF2 fused GAA polypeptide is cleared from the circulation excessively rapidly.

### Example 8: Tissue Half-Life of GAA

[0727] The objective of this experiment was to determine the rate at which GAA activity is lost once the IGF2-GAA fusion polypeptide or SS-IGF2-GAA double fusion polypeptide expressed from the rAAV vector reaches its target tissue. In the Pompe mouse model, MYOZYME® appears to have a tissue half-life of about 6-7 days in various muscle tissues (Application Number 125141/0 to the Center for Drug Evaluation and Research and Center for Biologics Evaluation and Research, Pharmacology Reviews).

[0728] Pompe mice (Pompe mouse model 6neo/6neo as described in Raben (1998) JBC, 273:19086-19092, the disclosure of which is hereby incorporated by reference) are injected in the jugular vein with the rAAV vectors generated in Examples 1 and 2. Mice are then sacrificed at 1, 5, 10, and 15 days post injection. Tissue samples were homogenized and GAA activity measured according to standard procedures. The tissue half-life of GAA activity from IGF2-GAA fusion polypeptide and/or SS-IGF2-GAA double fusion polypeptide and the untagged GAA are calculated from the decay curves in different tissues (e.g., quadriceps tissue; heart tissue; diaphragm tissue; and liver tissue), and the half-life in each tissue calculated. This can be compared to the half-life in rat L6 myoblasts to determine if, once inside cells in Pompe mice, IGF2-GAA fusion polypeptide and/or SS-IGF2-GAA double fusion polypeptide expressed from the rAAV vectors described herein appears to persist with kinetics similar to the untagged GAA. Furthermore, the knowledge of the decay kinetics of the IGF2-GAA fusion polypeptide and/or SS-IGF2-GAA double fusion polypeptide can help in the design of appropriate dosing intervals.

### Example 9: Uptake of IGF2-GAA Fusion Polypeptide and/or SS-IGF2-GAA Double Fusion Polypeptide into Lysosomes of C2C12 Mouse Myoblasts

[0729] C2C12 mouse myoblasts grown on poly-lysine coated slides (BD Biosciences) are transduced with the rAAV vectors produced in Examples 1 and 2. After washing the cells, the cells are then incubated in growth media for 1 hour, then washed four times with D-PBS before fixing with methanol at room temperature for 15 minutes. The following incubations were all at room temperature, each separated by three washes in D-PBS. Slides are permeabilized with 0.1% triton X-100 for 15 minutes, then blocked with blocking buffer (10% heat-inactivated horse serum (Invitrogen) in D-PBS). Slides are incubated with primary mouse monoclonal anti-GAA antibody 3A6-1F2 (1:5,000 in blocking buffer), then with secondary rabbit anti-mouse IgG AF594 conjugated antibody (Invitrogen A11032, 1:200 in blocking buffer). A FITC-conjugated rat anti-mouse LAMP-1 (BD Pharmingen 553793, 1:50 in blocking buffer) is the incubated. Slides are mounted with DAPI-containing mounting solution (Invitrogen) and viewed with a Nikon Eclipse 80i microscope equipped with fluorescein isothiocyanate, texas red and DAPI filters (Chroma Technology). Images can be captured with a photometric Cascade camera controlled by MetaMorph software (Universal Imaging), and merged using Photoshop software (Adobe). Co-localization of signal detected by anti-GAA antibody with signal detected by antibody directed against a lysosomal marker, LAMP1 can be assessed to demonstrates that IGF2-tagged GAA is delivered to lysosomes.

### Example 10: Assessing the Treatment of the rAAV Vectors in a Pompe Mouse Model and Reversing Pompe Pathology

[0730] The rAAV vectors generated in Example 1 can be assessed in Pompe mouse mode, e.g., according to the methods described in Peng et al., “Reveglucosidase alfa (BMN 701), an IGF2-Tagged rhAcid α-Glucosidase, Improves Respiratory Functional Parameters in a Murine Model of Pompe Disease.” Journal of Pharmacology and Experimental Therapeutics 360.2 (2017): 313-323), which is incorporated herein in its entirety by reference.

[0731] Any Pompe mouse model can be used to assess the effect of the rAAV vectors at treating Pomoe disease. One mouse model of Pompe is described in Raben et al., JBC, 1998; 273(30); 19086-19092, which describes a disrupted GAA mouse model, and recapitulates critical features of both the infantile and the adult forms of the disease. In other instances, a Pompe mouse model (Sidman et al., 2008) can be used, as well as a strain of mice with a disrupted acid α-glucosidase gene (B6;129-GAAtm1Rabn/J; Pompe) (Jackson Laboratory, Bar Harbor, Me.). The Pompe mice develop the same cellular and clinical characteristics as in human adult Pompe disease (Raben et al., 1998). Animals are maintained in a 12-hour light/dark cycle, provided with fresh water and standard rodent chow ad libitum.

[0732] 4.5-5 month old Pompe mice can be administered the rAAV vectors described herein, and evaluated for glycogen clearance after administration for 4 or more weeks. Following a macroscopic assessment, the heart (left ventricle), quadriceps, diaphragm, psoas, and soleus muscles were collected, weighed, snap-frozen in liquid nitrogen, and stored at −60 to −90° C. prior to a quantitative analysis of glycogen-derived glucose. Muscles were homogenized in buffer (0.2 M NaOAc/0.5% NP40) on ice using ceramic spheres. Amyloglucosidase was added to clarified lysates at 37° C. to digest glycogen into glucose for subsequent colorimetric detection (430 nm, SpectraMax; Molecular Devices, Sunnyvale, Calif.) using a peroxidase-glucose oxidase enzyme reaction system (Sigma-Aldrich, St. Louis, Mo.). Paired samples are also measured without amyloglucosidase to correct for endogenous tissue glucose that was not in glycogen form at harvest. Glucose values were extrapolated from a six-point standard curve. The measured glucose concentration (mg/ml) is proportional to the glycogen concentration of the sample and is converted to mg glycogen/g tissue by adjusting for the homogenization step (5 μl buffer added per gram of tissue).

[0733] The effect of rAAV vectors described herein on individual mouse muscle glycogen levels can be evaluated using Phoenix-WinNonlin classic PD modeling (Phoenix build version 6.4; Certara, L. P., Princeton, N.J.). Results can be obtained for hGAA in heart, diaphragm, quadriceps, psoas, and soleus muscles. For pharmacokinetic analysis, WT mice can be administered the rAAV vectors generated in Example 1 and blood samples collected as terminal cardiac punctures at predose, 0.083, 0.5, 1, 2, and 4 hours postdose. Plasma hGAA concentrations can be quantified using a bridging electrochemiluminescent method with an LOQ of 100 ng/ml. Briefly, 0.5 μg/ml ruthenium-labeled anti-rhGAA (affinity purified goat polyclonal) and 0.5 μg/ml biotin-labeled anti-IGF2 (MAB792; R&D Systems, Minneapolis, Minn.) can be combined with K2EDTA plasma samples diluted 1:10 in buffer [Starting Block T20 (PBS); ThermoFisher Scientific, Sunnyvale, Calif.] and incubated for 1 hour before transfer to a blocked streptavidin assay plate (Meso Scale Diagnostics, Rockville, Md.). After a 30-minute incubation, the plate is washed, 1× Read Buffer T (Meso Scale Diagnostics) was added, and the electrochemiluminescent signal read on an SECTOR Imager 2400 (Meso Scale Diagnostics). hGAA concentrations can be extrapolated from a standard curve.

[0734] Alternatively, Heart and Diaphragm tissue homogenates can be harvested and rhGAA activity measured using the fluorogenic substrate (4-MUG).

[0735] The therapeutic effect of the GAA polypeptide produced using rAAV vectors generated in Examples 1 and 2 herein can be compared wt GAA in vivo. A study can be performed to compare the ability of a rAAV vector disclosed in Example 1 to that expressing a non-tagged wt GAA to clear glycogen from skeletal muscle tissue in Pompe mice (e.g., Pompe mouse model 6neo/6neo animals were used (Raben (1998) JBC 273:19086-19092)). Groups of Pompe mice (5/group) received IV injections of one of two doses of wt GAA or a rAAV vector generated in Example 1 or vehicle. Five untreated animals can be used as control, and receive four weekly injection of saline solution. Animals receive oral diphenhydromine, 5 mg/kg one hour prior to injections 2, 3, and 4. Mice were sacrificed one week after the injection, and tissues (diaphragm, heart, lung, liver, soleus, quadriceps, gastrocnemius, TA, EDL, tongue) are harvested for histological and biochemical analysis. Glycogen content in the tissue homogenates can be measured using A. niger amyloglucosidase and the Amplex Red Glucose assay kit, and GAA enzyme levels assessed in different tissue homogenates using standard procedures.

[0736] Glycogen content in tissue homogenates can be measured using A. niger amyloglucosidase and the Amplex® Red Glucose assay kit (Invitrogen) essentially as described by Zhu et al. (2005) Biochem J., 389:619-628.

[0737] It is expected that the rAAV vector ss-IGF2-GAA rAAV as described herein and produced by the methods of Examples 1 and 2 will have more secretion followed by uptake into muscle and greater therapeutic effect in the Pompe mouse model as compared to a IGF2-GAA rAAV (i.e., without the secretory signal sequence), which is expected to be greater than wtGAA rAAV vector (i.e., without either of the heterologous secretory signal and the IGF2 targeting peptide), and/or MYOZYME®. It is further expected that the rAAV vector comprising modified GAA as disclosed herein e.g., comprising GAA with H201L mutation is therapeutically more effective in the Pompe mouse model than the rAAV comprising unmodified GAA e.g., wtGAA. Given the established Pompe model, these results are expected to translate into the clinic and correlate with therapeutic effect for the treatment of Pompe disease.

### Example 11: Clearance of Glycogen In Vivo

[0738] The objective of this experiment is to determine the rate at which glycogen is cleared from heart tissue of Pompe mice after a single injection of rAAV vector expressing IGF2-GAA fusion polypeptide and/or SS-IGF2-GAA double fusion polypeptide produced in Examples 1 and 2.

[0739] Pompe mice (Pompe mouse model 6neo/6neo as described in Raben (1998) JBC, 273:19086-19092, the disclosure of which is hereby incorporated by reference) are injected in the jugular vein with a rAAV vector expressing produced in Examples 1 and 2. Mice were sacrificed at 1, 5, 10, and 15 days post injection. Heart tissue samples are homogenized according to standard procedures and analyzed for glycogen content. Glycogen content in these tissue homogenates is measured using A. niger amyloglucosidase and the Amplex® Red Glucose assay kit (Invitrogen) essentially as described by Zhu et al. (2005) Biochem J., 389:619-628. Assessment of the heart tissue from mice can determine if there is almost complete clearance of glycogen in the mice administered rAAV vector expressing IGF2-GAA fusion polypeptide and/or SS-IGF2-GAA double fusion polypeptide produced in Examples 1 and 2 as compared to mice administered a rAAV where GAA was not fused to a IGF2 targeting peptide and/or SS as described herein, where only a small change in glycogen content would indicate minimal clearance.

### Example 12: Exemplary Liver Specific Promoters

[0740] Exemplary liver-specific promoters selected from Table 4 herein, or selected from those disclosed in Tables 4 herein, were cloned upstream of the luciferase reporter gene followed by SV40 late PolyA signal into a vector with a backbone having properties essentially identical to pUC19. In particular, experiments assessing promoters SP0412 and SP0422 were cloned into constructs for generation of rAAV. DNA preparations of the plasmids were transfected into either Huh7 (a hepato-cellular carcinoma cell line), HeLa (an immortal cell line derived from cervical cancer) or HEK293 (human embryonic kidney cells) to assess transcriptional activity. Huh-7 cells were sourced from JCRB Cell Bank (JCRB0403), HeLa and HEK293 were sourced from ECACC cell bank. All cell lines were grown and maintained according to the cell banks' recommendations.

[0741] Transfections were performed in 48 well plates in triplicate using FuGene HD Transfection Reagent (Promega #E2311) at a DNA:FuGene HD ratio of 1:1.1. Luciferase activity was measured 24 hours after transfection. Cells were washed with phosphate buffered saline (PBS), lysed in 100 μl Passive Lysis Buffer (Promega #E194A) and stored at −80° C. overnight. Luciferase activity was quantified using the Luciferase Reporter 1000 assay system (Promega #E4550) following manufacturer's guidelines in 10 μl of lysate using 96 well flat bottom solid white Microplate FluoroNunc plates (ThermoFisher #236105) and luminescence quantified in a FLUOstar Omega plate reader (BMG Labtech) machine.

[0742] The above luciferase methods are conventional in the art, and similar techniques have been described extensively in the literature, e.g. in Alam and Cook, “Reporter Genes: Application to the Study of Mammalian Gene Transcription”, ANALYTICAL BIOCHEMISTRY 188, 245-254 (1990).

[0743] Data

[0744] The sequences of exemplary liver-specific promoters used are shown in Tables 4 herein. The ability of these synthetic liver-specific promoters to drive expression in liver cells was benchmarked against the ubiquitous CMV_IE and CBA promoters, and also against the known liver specific promoter LP1. All of the synthetic promoters according to the invention showed higher activity than the LP1 promoter in Huh7 cells (data not shown). When these promoters were counter-screened in non-liver-derived HEK293 and HeLa cells, they showed negligible activity compared to the ubiquitously active promoters CMV_IE and CBA (data not shown).

[0745] The activity of the liver-specific promoters (i.e. all of the promoters set out in Tables 4) were also tested in Huh7 cells using the materials and methods essentially as described in above. However, in this case the activity of the liver-specific promoters was compared to the activity of the promoter TBG (SEQ ID NO: 435), as TBG was found to have higher and more consistent in vitro expression than LP1. It should be noted that TBG is an extremely powerful liver-specific promoter, and thus a promoter which shows expression which is less than TBG may still be extremely useful. In particular, liver-specific promoters disclosed in Table 4, or functional variants thereof, which are shorter than TBG, but which still demonstrate high levels of activity (e.g. 15%, more preferably 25%, 50%, or 75% of the activity of TBG of SEQ ID NO: 435 or higher) are of particular interest.

[0746] The specificity of the liver-specific promoters for liver cells was also tested using non-liver HEK293 cells, using the materials and methods described in Example 2. The activity of the liver-specific promoters is expressed compared to the activity of CMV-IE (SEQ ID NO: 433) (TBG and LP1 are liver-specific and thus not particularly active in HEK293 cells). ‘Relative activity’ in the graphs showing the specificity of the liver-specific promoters tested in HEK293 cells is the activity of the named promoter expressed as a ratio to the activity of CMV-IE, wherein 1 is the same activity as the CMV-IE promoter (SEQ ID NO: 433), more than 1 is higher activity compared to CMV-IE and lower than 1 is lower activity compared to the CMV-IE promoter of SEQ ID NO: 433.

### Example 13: Expression from Exemplary Liver Specific Promoters In Vivo

[0747] Certain liver-specific promoters were selected as exemplary liver-specific promoters for assessment in vivo. In particular, minimal promoter CRM_SP0239 (SEQ ID NO: 87) and CRM-_SP0412 (SEQ ID NO: 86) and synthetic liver-specific promoters SP0239 (SEQ ID NO: 93), SP0412 (SEQ ID NO: 91) and SP0422 (SEQ ID NO: 92) were assessed in vivo (see FIG. 10 and FIG. 13A-13B).

[0748] Aav Production:

[0749] The activity of a subset of the promoters according to this invention were tested in vivo. The synthetic promoters included in this study were SP0239, SP0244, SP0412 and the positive control LP1. The reporter gene used was fLUC-T2A-EGFP, i.e. fLUC (firefly Luciferase) fused to mEGFP (mutant green fluorescent protein) via T2A signal (two-way self-cleaving peptides). pAAV_SYNP_Luc-T2A-GFP destination vector is derived from pAAV ZsGreen1 (purchased from Clontech) in which the ZsGreen1 reporter was replaced by the Luc-T2A-GFP dual reporter. All DNA plasmids were prepared using QIAGEN Plasmid Mega Kit (Qiagen #12181, Germany) according to manufacturer instructions.

[0750] A rAAV producer cell line was cultured in Culture dish, Tissue culture treated, 145 mm (Greiner Bio-One Ltd #639160, UK) in Dulbecco's modified Eagle's medium, high glucose, GlutaMAX supplement (Gibco (Life Technologies) #61965-059, UK) supplemented with 10% (v/v) fetal bovine serum (Sigma #F7524,UK), and incubated at 37° C. and 5% CO₂. Other reagents for cell culture were purchased from Invitrogen-UK and plasticware form Life Technologies.

[0751] All AAV vectors that were used in this study were pseudotyped in AAV9 capsid. A rAAV producer cell line was co-transfected with plasmids wherein the reporter gene was controlled by different promoters alongside a plasmid encoding the helper functions to allow virus propagation (pDG9). The rAAV producer cell line were transfected using Polyethylenimine (PEI) (Sigma-Aldrich #764604, UK) at stock concentration of (1ug/ul) using molar ratio of 1:3 (DNA:PEI).

[0752] AAV Purification and Titration:

After 72 hr of transfection, cells were lysed and crude lysate was filtered then purified by HPLC columns containing POROS™ CaptureSelect™ AAV Resin (Thermo Scientific, #A36739) and using AKTAprime plus (High performance liquid chromatography-HPLC system (GE Healthcare, #11001313).

[0753] The number of vector genomes was determined by qPCR titration to target LUC cassettes with forward primer (ACGCTGGGCTACTTGATC—SEQ ID NO: 445), reverse primer (CGAGGAGGAGCTATTCTTG—SEQ ID NO: 446) and probe (TTTCGGGTCGTGCTCATG—SEQ ID NO: 447) following manufacturer instructions of Luna® Universal qPCR Master Mix (NEB #M3003, UK) in QuantStudio™ 3 System Real-Time PCR (Thermo Fisher Scientific, UK) and data analysed by QuantStudio design and analysis software V1.4.1.

[0754] Animal Procedures:

[0755] Outbred 6 weeks old CD1 male mice were purchased from Charles River-UK. They were kept in quarantine for one week and then moved to their closed ventilation cages and maintained in minimal-disease facilities. They were caged at 5 mice/cage and normalized into their weights with food and water ad libitum. Newly housed mice were given another week for acclimatization before carrying out any experiments. This study was conducted under statutory Home Office recommendation; regulatory, ethics, and licensing procedures; and the Animals (Scientific Procedures) Act 1986 and following the institutional guidelines at University College London.

[0756] Animal Injections:

[0757] AAV was administered to 8-week-old young adult male CD1 mice anaesthetised with 2%-4% isoflurane supplied in medical air (21% oxygen) (Abbotts Laboratories, UK) in warm chamber (Thermo Fisher Scientific, UK). The mice were injected intravenously into lateral tail vein using an Insulin syringe: 27 G 1/2 in., 1.0 ml (Fisher Scientific, UK). Each mouse is injected with AAV vectors dose of 8E+10 AAV viral genome per mouse in a final volume of 200 μl of physiological saline solution. The mice were then allowed to return to normal temperature before placing them back into their cages.

[0758] Bioluminescence Imaging

[0759] Mice were subjected to weekly whole-body bioluminescence imaging. Where appropriate, mice were anaesthetised with 2%-4% isoflurane supplied in medical air (21% oxygen) and received an intraperitoneal injection of 300 μl of 15 mg/mL of D-luciferin potassium salt (Syd Labs #MB000102, US) using an Insulin syringe (Fisher Scientific, UK). D-luciferin stock was prepared in physiological saline (Gibco #14190-094, UK). Mice were imaged after 5 minutes using a cooled charged-coupled device camera, (IVIS Lumina II machine, Perkin Elmer, UK) for between 1 second and 10 seconds. The regions of interest (ROI) were measured using IVIS Lumina Living image 4.5.5 (Perkin Elmer) and expressed as photons per second per centimetre squared per steradian (photons/second/cm²/sr).

[0760] Data

[0761] The results of this study are shown in FIG. 10. The results are expressed as the mean of the luciferase bioluminescence intensity, total flux (in photons per second), for all tested animals in each group. Error bars are standard error of the mean. In group ‘Saline’ (n=10), the animals were injected with saline only and no luciferase bioluminescence is detected. This group is a negative control and indicates that no luciferase bioluminescence is detected if no luciferase operably linked to a promoter is injected. In group ‘LP1’ (n=9), the animals were injected with luciferase operably linked to the LP1 promoter (SEQ ID NO: 432) and luciferase bioluminescence is detected. This group is a positive control and indicates that luciferase is expressed under the control of the LP1 promoter and can be detected.

[0762] To test the activity of the liver-specific promoters according to this invention, animals were injected with a construct comprising luciferase under operably linked to two promoters. In group ‘SP0244’ (n=8), luciferase is operably linked to the SP0244 promoter. In group ‘SP0239’ (n=10), luciferase is operably linked to the SP0239 promoter (SEQ ID NO: 93).

[0763] As can be seen from FIG. 10, expression was highest from promoters ‘SP0244’ (SEQ ID NO: 366) and ‘SP0239’ (SEQ ID NO: 93), as shown by higher bioluminescence intensity than the generic liver specific promoter ‘LP1’ (SEQ ID NO: 432). Accordingly, promoters SP0244 and SP0239 show high activity in vivo and their activity is higher than the activity of LP 1.

[0764] In FIGS. 13A and 13B, the expression of GAA was detected from different rAAV vectors comprising different LSP; LSP NEW (SEQ ID NO: 160); 412 NEW (SEQ ID NO: 159); TTR NEW (SEQ ID NO: 155); 412-TTR, 422 Stuffer (SEQ ID NO: 158); 422 TTR; 412 Stuffer (SEQ ID NO: 156) intracellularly in Huh7 cells and HEPH2 cells, demonstrating that hGAA can be expressed from rAAV at significant levels using SP0412 and SP0422 promoter. Furthermore, as shown in FIGS. 13A and 13B, the GAA expression by any of the above AAV vectors is significantly higher than the expression of GAA from an AAV vector comprising a generic liver specific promoter. Importantly, FIGS. 13A and 13B show that expression of hGAA from rAAV vectors comprising promoters 412 (SEQ ID NO: 91) and 422 (SEQ ID NO: 92) leads to high expression of hGAA in Huh7 and HepG2 cells, as compared to the level of hGAA expression from a rAAV comprising the LP1 promoter (SEQ ID NO: 432) which is referred to as “LSP SS” in FIGS. 13A and 13B.

[0765] This experiment demonstrates confirms that the in vitro results obtained in Example 12 can be achieved with significant GAA protein expression in vivo. A range of liver-specific promoters with varying strength can be used in the methods and compositions disclosed herein, which can be very useful to provide the desired level of liver-specific expression in a therapeutic setting for the treatment of a disease, e.g., Pompe disease.

### Example 14: Clinical Study of Pompe Patients

[0766] Two cohorts of 3 subjects each have been dosed with rAAV-LSP-hGAA in clinical study ACT-CS101, which recruited adult subjects with LOPD. Cohort 1 subjects received 1.6E12 vg/kg and Cohort 2 subjects received 1.6E13 vg/kg. All subjects have been withdrawn from enzyme replacement therapy (ERT) (alglucosidase alfa [LUMIZYME®]); Cohort 1 subjects remained on ERT for 6 months after rAAV-LSP-hGAA administration, whereas Cohort 2 subjects were withdrawn from ERT at the time of rAAV-LSP-hGAA administration. The construct for the AAV8-LSPhGAA is shown in FIG. 3B, and is an infectious, non-replicating recombinant adeno-associated virus (AAV) serotype 8 vecto comprising AAV2 ITRs, or a haploid AAV vector comprising capsid 8 and another capsid protein e.g., from AAV2 (e.g., AAV2/8-LSPhGAA), expressing human acid alpha-glucosidase (hGAA).

[0767] Preliminary data indicate no serious adverse events as of 1 Jun. 2020 that met the expedited reporting rule. Reported adverse events were mostly expected/anticipated and have been mild to moderate in severity, transient and reversible.

[0768] Cohort 1 received 1.6E12 vg/kg which has been well tolerated by all 3 subjects, all of which have now reached 12 months post-dose with biopsy data being available shortly. No elevations in aspartate transaminase (AST) or alanine transaminase (ALT) have been observed in any subject enrolled in Cohort 1 (1.6E12 vg/kg). All subjects received immune prophylaxis with prednisone starting at 60 mg/day for 4 weeks followed by a tapering regimen (5 mg/week for 11 weeks). No subject in Cohort 1 exhibited positive enzyme-linked immune absorbent spot (ELISPOT) reactivity for capsid or acid alfa-glucosidase (GAA). All subjects exhibited serum GAA concentrations above their respective baseline values; however, serum GAA concentrations are decreasing over time. None have needed to receive rescue with ERT.

[0769] Cohort 2 received 1.6E13 vg/kg (dosed mid-August, mid-September and early October 2019). Asymptomatic elevations in AST and ALT have been observed in all subjects in Cohort 2 beginning on Day 46 (004), Day 41 (005), and Day 55 (006). All subjects received immune prophylaxis with prednisone starting at 60 mg/day; however, all subjects received augmented doses of prednisone in response to elevations in AST and ALT. Two subjects (004 and 005) received IV methylprednisolone. Two subjects in Cohort 2 had CTCAE Grade 3 laboratory elevations. Subject 004 experienced one Grade 3 elevation in ALT (348 U/L; ULN=63; 5×ULN=315) and one Grade 3 elevation in AST (222 U/L; ULN=41; 5×ULN=205). Both Grade 3 elevations occurred on the same day and were considered definitely/probably related to ACTUS-101 by the Principal Investigator. Subject 5 experienced one Grade 3 elevation in gamma-glutamyl transferase (GGT) (311 U/L; ULN=50; 5× ULN=250) which the Principal Investigator considered possibly related to ACTUS-101, although more probably to prednisone. All Grade 3 elevations were transient and asymptomatic. Subject 004 had a liver biopsy within 10 days following the Grade 3 laboratory elevations, the results of which indicated mild and non-specific inflammation. This subject also reported a lipoma at Week 24, which has been attributed to the high and long duration of steroid administration, which has since been tapered. All subjects exhibited positive but varying levels of ELISPOT T cell responses to AAV8 capsid which is not always concordant in time with the noted liver enzyme changes.

[0770] Aalytical comparability studies were conducted to determine the effects, or absence thereof, of proposed manufacturing changes on the identity, strength, quality, purity, or potency of the AAV8-LSPhGAA.

[0771] Analytical comparability of AAV8-LSPhGAA can be assessed using a qualified in vitro potency assay run at Absorption Systems Boston, LLC (ASB, Medford, Mass.) under Method standard operating procedure (SOP), which is an in vitro assay for determination of the potency of AAV8-LSPhGAA test samples relative to a reference standard. In brief, a 6-day assay in 96-well HuH-7 cell culture plate format (human hepatocyte cell line, Sekisui XenoTech, Cat. No JCRB0403) is performed, transduced with AAV8-LSPhGAA using a 9-point dilution scheme, and incubated for 96±2 hours after which GAA is measured in the cell supernatant by the 4-MU bioassay. Relative potency is calculated with the parallel line assay model using PLA Software 3.0 (Stegmann Systems).

[0772] Dose Ranging Studies:

[0773] Dose-ranging studies in GAA knockout (KO) mice, which were used to support the pharmacodynamic effects of AAV8-LSPhGAA. Male and female GAA KO Pompe mice (B6;129-Gaatm1Rabn/J, stock no. 004154, 6neo) are be injected at 8 to 12 weeks (modification 1 proposed 9 to 12 week prior to feedback from the agency) of age by tail vein (intravenous) injection (bolus). A minimum of 6 males (M) and 6 females (F) are be randomly assigned to receive one of the test products (AAV8-LSPhGAA) dosed at 2E11, 2E12 and 2E13 vg/kg based on Han et al (2017 and 2019) and a control group will receive the formulation buffer only (vehicle). Animals will be followed for 8 weeks and then sacrificed for tissue and blood collection. Experimental and control groups will remain blinded to the operator(s).

[0774] In life monitoring will consist of daily checks for mortality. Moribund animals will be removed from the study (with gross necropsy examination and tissue sampling for histopathology performed). Serum GAA will be measured in all groups every 2 weeks until termination at 8 weeks after dosing.

[0775] Measurements and tissue collection at necropsy will include, Liver, heart, quadriceps, Tibialis A., Diaphram, Brain, Soleus, kidney, spleen, lung, and other clinical measurements, including: (1) Terminal body weight, (2) Organ weights for liver and heart, (3) Serum (GAA activity) and storage at −20° C. for subsequent measurement of anti-GAA antibodies (ADA), (4) Liver, heart, soleus, quadricep, tibialis anterior, tongue, diaphragm, brain to be split in several fragments. Additional measurements includes: (4) GAA activity in serum and tissue and glycogen content in tissues, as measured by qualified assays (tissue will be snap frozen in liquid nitrogen and stored at −80° C.). A target of ˜50 mg of each specified tissue will be collected for each assay, and (5) Histopathological examination analysis fixed in 10% neutral buffered formalin for Haemotoxylin and Eosin (H&E) staining on tissues as indicated above as well as any observed gross lesions at necropsy. A subsection of tissues will be fixed in glutaraldehyde for glycogen staining as needed (Periodic acid-Schiff staining—PAS), Assessment of immune responses to the transgene product by measuring anti-GAA antibody responses (ADA), Total DNA for vector genome copy number per diploid genome determination—vg/ug of DNA (snap frozen in liquid nitrogen and then stored at −80° C.).

[0776] Dose-ranging studies in GAA KO mice will support in vivo comparability between AAV8-LSPhGAA and a modified AAV vector, modified according to the disclosure herein (e.g., different LSP, optimization of hGAA sequence, if no significant differences are observed by the following measurements: 1. Histopathology by certified veterinary pathologist in all collected tissues (safety); 2. GAA activity and glycogen content in heart, diaphragm and quadriceps (efficacy) with a relative activity of the modified AAV vector between 0.80 to 1.25 (80-125%) of AAV8-LSPhGAA; 3. Vector genome DNA per ug DNA in collected tissues (biodistribution) with a relative biodistribution of a modified AAV vector between 0.80 to 1.25 (80-125%) of AAV8-LSPhGAA; 4. No change of anti-GAA ADA.

[0777] While the present inventions have been described and illustrated in conjunction with a number of specific embodiments, those skilled in the art will appreciate that variations and modifications may be made without departing from the principles of the inventions as herein illustrated, as described and claimed. The present inventions may be embodied in other specific forms without departing from their spirit or essential characteristics. The described embodiments are considered in all respects to be illustrative and not restrictive.

[0778] In closing, regarding the exemplary embodiments of the present invention as shown and described herein, it will be appreciated that a genomic construct, comprising an AAV (adeno-associated virus) viral virion is disclosed and configured for delivery of AAV vectors. Because the principles of the invention may be practiced in a number of configurations beyond those shown and described, it is to be understood that the invention is not in any way limited by the exemplary embodiments, but is generally directed to a genomic construct, comprising an AAV (adeno-associated virus) viral virion apparatus and is able to take numerous forms to do so without departing from the spirit and scope of the invention.

[0779] Certain embodiments of the present invention are described herein, including the best mode known to the inventor(s) for carrying out the invention. Of course, variations on these described embodiments will become apparent to those of ordinary skill in the art upon reading the foregoing description. The inventor(s) expect skilled artisans to employ such variations as appropriate, and the inventor(s) intend for the present invention to be practiced otherwise than specifically described herein. Accordingly, this invention includes all modifications and equivalents of the subject matter recited in the claims appended hereto as permitted by applicable law. Moreover, any combination of the above-described embodiments in all possible variations thereof is encompassed by the invention unless otherwise indicated herein or otherwise clearly contradicted by context.

[0780] Groupings of alternative embodiments, elements, or steps of the present invention are not to be construed as limitations. Each group member may be referred to and claimed individually or in any combination with other group members disclosed herein. It is anticipated that one or more members of a group may be included in, or deleted from, a group for reasons of convenience and/or patentability. When any such inclusion or deletion occurs, the specification is deemed to contain the group as modified thus fulfilling the written description of all Markush groups used in the appended claims.

[0781] Unless otherwise indicated, all numbers expressing a characteristic, item, quantity, parameter, property, term, and so forth used in the present specification and claims are to be understood as being modified in all instances by the term “about.” As used herein, the term “about” means that the characteristic, item, quantity, parameter, property, or term so qualified encompasses a range of plus or minus ten percent above and below the value of the stated characteristic, item, quantity, parameter, property, or term. Accordingly, unless indicated to the contrary, the numerical parameters set forth in the specification and attached claims are approximations that may vary. At the very least, and not as an attempt to limit the application of the doctrine of equivalents to the scope of the claims, each numerical indication should at least be construed in light of the number of reported significant digits and by applying ordinary rounding techniques. Notwithstanding that the numerical ranges and values setting forth the broad scope of the invention are approximations, the numerical ranges and values set forth in the specific examples are reported as precisely as possible. Any numerical range or value, however, inherently contains certain errors necessarily resulting from the standard deviation found in their respective testing measurements. Recitation of numerical ranges of values herein is merely intended to serve as a shorthand method of referring individually to each separate numerical value falling within the range. Unless otherwise indicated herein, each individual value of a numerical range is incorporated into the present specification as if it were individually recited herein. Similarly, as used herein, unless indicated to the contrary, the term “substantially” is a term of degree intended to indicate an approximation of the characteristic, item, quantity, parameter, property, or term so qualified, encompassing a range that can be understood and construed by those of ordinary skill in the art.

[0782] Use of the terms “may” or “can” in reference to an embodiment or aspect of an embodiment also carries with it the alternative meaning of “may not” or “cannot.” As such, if the present specification discloses that an embodiment or an aspect of an embodiment may be or can be included as part of the inventive subject matter, then the negative limitation or exclusionary proviso is also explicitly meant, meaning that an embodiment or an aspect of an embodiment may not be or cannot be included as part of the inventive subject matter. In a similar manner, use of the term “optionally” in reference to an embodiment or aspect of an embodiment means that such embodiment or aspect of the embodiment may be included as part of the inventive subject matter or may not be included as part of the inventive subject matter. Whether such a negative limitation or exclusionary proviso applies will be based on whether the negative limitation or exclusionary proviso is recited in the claimed subject matter.

[0783] When used in the claims, whether as filed or added per amendment, the open-ended transitional term “comprising” (along with equivalent open-ended transitional phrases thereof such as “including,” “containing” and “having”) encompasses all the expressly recited elements, limitations, steps and/or features alone or in combination with un-recited subject matter; the named elements, limitations and/or features are essential, but other unnamed elements, limitations and/or features may be added and still form a construct within the scope of the claim. Specific embodiments disclosed herein may be further limited in the claims using the closed-ended transitional phrases “consisting of” or “consisting essentially of” in lieu of or as an amendment for “comprising.” When used in the claims, whether as filed or added per amendment, the closed-ended transitional phrase “consisting of” excludes any element, limitation, step, or feature not expressly recited in the claims. The closed-ended transitional phrase “consisting essentially of” limits the scope of a claim to the expressly recited elements, limitations, steps and/or features and any other elements, limitations, steps and/or features that do not materially affect the basic and novel characteristic(s) of the claimed subject matter. Thus, the meaning of the open-ended transitional phrase “comprising” is being defined as encompassing all the specifically recited elements, limitations, steps and/or features as well as any optional, additional unspecified ones. The meaning of the closed-ended transitional phrase “consisting of” is being defined as only including those elements, limitations, steps and/or features specifically recited in the claim, whereas the meaning of the closed-ended transitional phrase “consisting essentially of” is being defined as only including those elements, limitations, steps and/or features specifically recited in the claim and those elements, limitations, steps and/or features that do not materially affect the basic and novel characteristic(s) of the claimed subject matter. Therefore, the open-ended transitional phrase “comprising” (along with equivalent open-ended transitional phrases thereof) includes within its meaning, as a limiting case, claimed subject matter specified by the closed-ended transitional phrases “consisting of” or “consisting essentially of” As such, embodiments described herein or so claimed with the phrase “comprising” are expressly or inherently unambiguously described, enabled and supported herein for the phrases “consisting essentially of” and “consisting of.”

[0784] While aspects of the invention have been described with reference to at least one exemplary embodiment, it is to be clearly understood by those skilled in the art that the invention is not limited thereto. Rather, the scope of the invention is to be interpreted only in conjunction with the appended claims and it is made clear, here, that the inventor(s) believe that the claimed subject matter is the invention.

### REFERENCES

[0785] The references disclosed in the specification and Examples, including but not limited to patents and patent applications, and international patent applications are all incorporated herein in their entirety by reference.

[0786] All patents, patent publications, and other publications referenced and identified in the present specification are individually and expressly incorporated herein by reference in their entirety for the purpose of describing and disclosing, for example, the compositions and methodologies described in such publications that might be used in connection with the present invention. These publications are provided solely for their disclosure prior to the filing date of the present application. Nothing in this regard should be construed as an admission that the inventors are not entitled to antedate such disclosure by virtue of prior invention or for any other reason. All statements as to the date or representation as to the contents of these documents is based on the information available to the applicants and does not constitute any admission as to the correctness of the dates or contents of these documents.

### REFERENCES

[0787] 1. L Lisowski, A P Dane, K Chu, Y Zhang, S C Cunninghamm, E M Wilson, et al. Selection and evaluation of clinically relevant AAV variants in a xenograft liver model Nature, 506 (2014), pp. 382-386 (LK03 and others LKO-19)
[0788] 2. Grimm D, Lee J S, Wang L, Desai T, Akache B Storm T A, Kay M A. In vitro and in vivo gene therapy vector evolution via multispecies interbreeding and retargeting of adeno-associated viruses. J Virol. 2008 June: 82(12):5887-911. (AAV-DJ)
[0789] 3. Powell S K, Khan N, Parker C L, Samulski R J, Matsushima G, Gray S J, McCown T J. Characterization of a novel adeno-associated viral vector with preferential oligodendrocyte tropism. Gene Ther. 2016 Nov.: 23(1 1):807-814. (Olig001)
[0790] 4. Tervo D G, Hwang B Y, Viswanathan S, Gaj T, Lavzin M, Ritola K D, Lindo S, Michael S, Kuleshova E, Ojala D, Huang C C, Gerfen C R, Schiller J, Dudman J T, Hantman A W, Looger L L, Schaffer D V, Karpova A Y. A Designer AAV Variant Permits Efficient Retrograde Access to Projection Neurons. Neuron. 2016 Oct. 19: 92(2):372-382. (rAAV2-retro)
[0791] 5. Marsic D, Govindasamy L, Currlin S, Markusic D M, Tseng Y S, Herzog R W, Agbandje-McKenna M, Zolotukhin S. Vector design Tour de Force: integrating combinatorial and rational approaches to derive novel adeno-associated virus variants. Mol Ther. 2014 Nov.: 22(11):1900-9. (AAV-LiC)
[0792] 6. Sallach J, Di Pasquale G, Larcher F, Niehoff N, Rubsam M, Huber A, Chiarini J, Almarza D, Eming S A, Ulus H, Nishimura S, Hacker U T, Ballek M, Niessen C M, Buning H. Tropism-modified AAV vectors overcome barriers to successful cutaneous therapy. Mol Ther. 2014 May: 22(5):929-39. (AAV-Keral, AAV-Kera2, and AAV-Kera3)
[0793] 7. Dalkara D, Byrne L C, Klimczak R R, Visel M, Yin L, Merigan W H, Flannery J G, Schaffer D V. In vivo-directed evolution of a new adeno-associated virus for therapeutic outer retinal gene delivery from the vitreous. Sci Transl Med. 2013 June 12:5(189):189ra76. (AAV 7m8)
[0794] 8. Asuri P, Bartel M A, Vazin T, Jang J H, Wong T B, Schaffer D V. Directed evolution of adeno-associated virus for enhanced gene delivery and gene targeting in human pluripotent stem cells. Mol Ther. 2012 Feb.: 20(2):329-38. (AAV1.9)
[0795] 9. Jang J H, Koerber J T, Kim J S, Asuri P, Vazin T, Bartel M, Keung A, Kwon I, Park K I, Schaffer D V. An evolved adeno-associated viral variant enhances gene delivery and gene targeting in neural stem cells. Mol Ther. 2011 Apr.: 19(4):667-75. doi: 10.1038/mt.2010.287. (AAV r3.45)
[0796] 10. Gray S J, Blake B L, Criswell H E, Nicolson S C, Samulski R J, McCown T J, Li W. Directed evolution of a novel adeno-associated virus (AAV) vector that crosses the seizure-compromised blood-brain barrier (BBB). Mol Ther. 2010 Mar.: 18(3):570-8 (AAV clone 32 and 83)
[0797] 11. Maguire C A, Gianni D, Meijer D H, Shaket L A, Wakimoto H, Rabkin S D, Gao G, Sena-Esteves M. Directed evolution of adeno-associated virus for glioma cell transduction. J Neurooncol. 2010 Feb.: 96(3):337-47. (AAV-U87R7-C5)
[0798] 12. Koerber J T, Klimczak R, Jang J H, Dalkara D, Flannery J G, Schaffer D V. Molecular evolution of adeno-associated virus for enhanced glial gene delivery. Mol Ther. 2009 Dec.: 17(12):2088-95. (AAV ShH13, AAV ShH19, AAV Ll-12)
[0799] 13. Li W, Zhang L, Johnson J S, Zhijian W, Grieger J C, Ping-Jie X, Drouin L M, Agbandje-McKenna M, Pickles R J, Samulski R J. Generation of novel AAV variants by directed evolution for improved CFTR delivery to human ciliated airway epithelium. Mol Ther. 2009 Dec.: 17(12):2067-77. (AAV HAE-1, AAV HAE-2)
[0800] 14. Klimczak R R, Koerber J T, Dalkara D, Flannery J G, Schaffer D V. A novel adeno-associated viral variant for efficient and selective intravitreal transduction of rat Muller cells. PLoS One. 2009 Oct. 14:4(10):e7467. (AAV variant ShH10)
[0801] 15. Excoffon K J, Koerber J T, Dickey D D, Murtha M, Keshavjee S, Kaspar B K, Zabner J, Schaffer D V. Directed evolution of adeno-associated virus to an infectious respiratory virus. Proc Natl Acad Sci USA. 2009 Mar. 10:106(10):3865-70. (AAV2.5T)
[0802] 16. Sellner L, Stiefelhagen M, Kleinschmidt J A, Laufs S, Wenz F, Fruehauf S, Zeller W J, Veldwijk M R. Generation of efficient human blood progenitor-targeted recombinant adeno-associated viral vectors (AAV) by applying an AAV random peptide library on primary human hematopoietic progenitor cells. Exp Hematol. 2008 August: 36(8):957-64. (AAV LS1-4, AAV Lsm)
[0803] 17. Li W, Asokan A, Wu Z, Van Dyke T, DiPrimio N, Johnson J S, Govindaswamy L, Agbandje-McKenna M, Leichtle S, Redmond D E Jr, McCown T J, Petermann K B, Sharpless N E, Samulski R J. Engineering and selection of shuffled AAV genomes: a new strategy for producing targeted biological nanoparticles. Mol Ther. 2008 Jul.:16(7):1252-60. (AAV1289)
[0804] 18. Charbel Issa P, De Silva S R, Lipinski D M, Singh M S, Mouravlev A, You Q. Assessment of tropism and effectiveness of new primate-derived hybrid recombinant AAV serotypes in the mouse and primate retina. PLoS ONE. 2013:8:e60361. (AAVHSC 1-17)
[0805] 19. Huang W, McMurphy T, Liu X, Wang C, Cao L. Genetic Manipulation of Brown Fat Via Oral Administration of an Engineered Recombinant Adeno-associated Viral Serotype Vector. Mol Ther. 2016 Jun.: 24(6):1062-9. (AAV2 Rec 1-4)
[0806] 20. Cronin T, Vandenberghe L H, Hantz P, et al. Efficient transduction and optogenetic stimulation of retinal bipolar cells by a synthetic adeno-associated virus capsid and promoter. EMBO Mol Med 2014:6:1175-1190 (AAV8BP2)
[0807] 21. Choudhury S R, Fitzpatrick Z, Harris A F, Maitland S A, Ferreira J S, Zhang Y, Ma S, Sharma R B, Gray-Edwards H L, Johnson J A, Johnson A K, Alonso L C, Punzo C, Wagner K R, Maguire C A, Katin R M, Martin D R, Sena-Esteves M. In Vivo Selection Yields AAV-Bl Capsid for Central Nervous System and Muscle Gene Therapy. Mol Ther. 2016 Aug.: 24(7):1247-57. (AAV-B1)
[0808] 22. Deverman B E, Pravda P L, Simpson B P, Kumar S R, Chan K Y, Banerjee A, Wu W L, Yang B, Huber N, Pasca S P, Gradinaru V. Cre-dependent selection yields AAV variants for widespread gene transfer to the adult brain. Nat Biotechnol. 2016 February: 34(2):204-9. doi: 10.1038/nbt.3440. (AAV-PHP.B)
[0809] 23. Pulicherla N, Shen S, Yadav S, Debbink K, Govindasamy L, Agbandje-McKenna M, Asokan A. Engineering liver-detargeted AAV9 vectors for cardiac and musculoskeletal gene transfer. Mol Ther. 2011 Jun.: 19(6):1070-8. (AAV9 derived mutants-AAV9.45, AAV9.61, AAV9.47)
[0810] 24. Yang L, Jiang J, Drouin L M, Agbandje-McKenna M, Chen C, Qiao C, Pu D, Hu X, Wang D Z, Li J, Xiao X. A myocardium tropic adeno-associated virus (AAV) evolved by DNA shuffling and in vivo selection. Proc Natl Acad Sci USA. 2009 Mar. 10:106(10):3946-51. (AAVM41)
[0811] 25. Korbelin J, Sieber T, Michelfelder S, Lunding L, Spies E, Hunger A, Alawi M, Rapti K, Indenbirken D, Muller O J, Pasqualini R, Arap W, Kleinschmidt J A, Trepel M. Pulmonary Targeting of Adena-associated Viral Vectors by Next-generation Sequencing-guided Screening of Random Capsid Displayed Peptide Libraries. Mol Ther. 2016 Jun. 24(6):1050-61. (AAV2 displayed peptides)
[0812] 26. Geoghegan J C, Keiser N W, Okulist A, Martins I, Wilson M S, Davidson B L. Chondroitin Sulfate is the Primary Receptor for a Peptide-Modified AAV That Targets Brain Vascular Endothelium In Vivo. Mol Ther Nucleic Acids. 2014 Oct 14:3:e202. (AAV2-GMN)
[0813] 27. Varadi K, Michelfelder S, Korff T, Hecker M, Trepel M, Katus H A, Kleinschmidt J A, Muller O J. Novel random peptide libraries displayed on AAV serotype 9 for selection of endothelial cell-directed gene transfer vectors. Gene Ther. 2012 Aug. 19(8):800-9. (AAV9-peptide displayed)
[0814] 28. Michelfelder S, Varadi K, Raupp C, Hunger A, Korbelin J, Pahrmann C, Schrepfer S, Muller O J, Kleinschmidt J A, Trepel M. Peptide ligands incorporated into the threefold spike capsid domain to re-direct gene transduction of AAV8 and AAV9. in vivo. PLoS One. 2011:6(8):e23101. (AAV8 and AAV9 peptide displayed)
[0815] 29. Yu C Y, Yuan Z, Cao Z, Wang B, Qiao C, Li J, Xiao X. A muscle-targeting peptide displayed on AAV2 improves muscle tropism on systemic delivery. Gene Ther. 2009 Aug. 16(8):953-62.
[0816] 30. Michelfelder S, Lee M K, deLima-Hahn E, Wilmes T, Kaul F, Muller O, Kleinschmidt J A, Trepel M. Vectors selected from adeno-associated viral display peptide libraries for leukemia cell-targeted cytotoxic gene therapy. Exp Hematol. 2007 Dec: 35(12): 1766-76.
[0817] 31. Muller O J, Kaul F, Weitzman M D, Pasqualini R, Arap W, Kleinschmidt J A, Trepel M. Random peptide libraries displayed on adeno-associated virus to select for targeted gene therapy vectors. Nat Biotechnol. 2003 Sep. 21(9):1040-6.
[0818] 32. Grifman M, Trepel M, Speece P, Gilbert L B, Arap W, Pasqualini R, Weitzman M D. Incorporation of tumor-targeting peptides into recombinant adeno-associated virus capsids. Mol Ther. 2001 Jun. 3(6):964-75.
[0819] 33. Anne Girod, Martin Ried, Christiane Wobus, Harald Lahm, Kristin Leike, Jurgen Kleinschmidt, Gilbert Deleage & Michael Ballek. Genetic capsid modifications allow efficient retargeting of adeno-associated virus type 2. Nature Medicine, 1052-1056 (1999)
[0820] 34. Bello A, Chand A, Aviles J, Soule G, Auricchio A, Kobinger G P. Novel adeno-associated viruses derived from pig tissues transduce most major organs in mice. Sci Rep. 2014 Oct 22:4:6644. (AAVpo2.1, -po4, -poS, and -po6).
[0821] 35. Gao G, Vandenberghe L H, Alvira M R, Lu Y, Calcedo R, Zhou X, Wilson J M. Clades of Adena-associated viruses are widely disseminated in human tissues. J Virol. 2004 Jun. 78(12):6381-8. (AAV rh and AAV Hu)
[0822] 36. Arbetman A E, Lochrie M, Zhou S, Wellman J, Scallan C, Doroudchi M M, et al. Novel caprine adeno-associated virus (AAV) capsid (AAV-Go.1) is closely related to the primate AAV-5 and has unique tropism and neutralization properties. J Virol. 2005:79:15238-15245. (AAV-Go.1)
[0823] 37. Lochrie M A, Tatsuno G P, Arbetman A E, Jones K, Pater C, Smith P H, et al. Adena-associated virus (AAV) capsid genes isolated from rat and mouse liver genomic DNA define two new AAV species distantly related to AAV-5. Virology. 2006:353:68-82. (AAV-mo.1)
[0824] 38. Schmidt M, Katano H, Bossis I, Chiarini J A. Cloning and characterization of a bovine adeno-associated virus. J Virol. 2004:78:6509-6516. (BAAV)
[0825] 39. Bossis I, Chiarini J A. Cloning of an avian adeno-associated virus (AAAV) and generation of recombinant AAAV particles. J Virol. 2003:77:6799-6810. (AAAV)
[0826] 40. Chen C L, Jensen R L, Schnepp B C, Connell M J, Shell R, Sferra T J, Bartlett J S, Clark K R, Johnson P R. Molecular characterization of adeno-associated viruses infecting children. J Virol. 2005 Dec: 79(23):14781-92. (AAV variants)
[0827] 41. Sen D, Gadkari R A, Sudha G, Gabriel N, Kumar Y S, Selot R, Samuel R, Rajalingam S, Ramya V, Nair S C, Srinivasan N, Srivastava A, Jayandharan G R. Targeted modifications in adeno-associated virus serotype 8 capsid improves its hepatic gene transfer efficiency in vivo. Hum Gene Ther Methods. 2013 Apr: 24(2):104-16. (AAV8 K137R)
[0828] 42. Li B, Ma W, Ling C, Van Vliet K, Huang L Y, Agbandje-McKenna M, Srivastava A, Aslanidi G V. Site-Directed Mutagenesis of Surface-Exposed Lysine Residues Leads to Improved Transduction by AAV2, But Not AAV8, Vectors in Murine Hepatocytes In Vivo. Hum Gene Ther Methods. 2015 Dec: 26(6):211-20.
[0829] 43. Gabriel N, Hareendran S, Sen D, Gadkari R A, Sudha G, Selot R, Hussain M, Dhaksnamoorthy R, Samuel R, Srinivasan N, et al. Bioengineering of AAV2 capsid at specific serine, threonine, or lysine residues improves its transduction efficiency in vitro and in vivo. Hum Gene Ther Methods. 2013 Apr: 24(2):80-93.
[0830] 44. Zinn E, Pacouret S, Khaychuk V, Turunen H T, Carvalho L S, Andres-Mateos E, Shah S, Shelke R, Maurer A C, Plovie E, Xiao R, Vandenberghe L H. In Silico Reconstruction of the Viral Evolutionary Lineage Yields a Potent Gene Therapy Vector. Cell Rep. 2015 Aug. 11:12(6):1056-68. (AAV Anc80L65)
[0831] 45. Shen S, Horowitz E D, Troupes A N, Brown S M, Pulicherla N, Samulski R J, Agbandje-McKenna M, Asokan A. Engraftment of a galactose receptor footprint onto adeno-associated viral capsids improves transduction efficiency. J Biol Chem. 2013 Oct 4:288(40):28814-23. (AAV2G9)
[0832] 46. Li C, Diprirnio N, Bowles D E, Hirsch M L, Monahan P E, Asokan A, Rabinowitz J, Agbandje-McKenna M, Samulski R J. Single amino acid modification of adeno-associated virus capsid changes transduction and humoral immune profiles. J Virol. 2012 August 86(15):7752-9. (AAV2 265 insertion-AAV2/265D)
[0833] 47. Bowles D E, McPhee S W, Li C, Gray S J, Sarnulski J J, Camp A S, Li J, Wang B, Monahan P E, Rabinowitz J E, et al. Phase 1 gene therapy for Duchenne muscular dystrophy using a translational optimized AAV vector. Mol Ther. 2012 Feb. 20(2):443-55 (AAV2.5)
[0834] 48. Messina E L, Nienaber J, Daneshmand M, Villarnizar N, Samulski J, Milano C, Bowles D E. Adena-associated viral vectors based on serotype 3b use components of the fibroblast growth factor receptor signaling complex for efficient transduction. Hum. Gene Ther. 2012 Oct: 23(10):1031-42. (AAV3 SASTG)
[0835] 49. Asokan A, Conway J C, Phillips J L, Li C, Hegge J, Sinnott R, Yadav S, DiPrimio N, Nam H J, Agbandje-McKenna M, McPhee S, Wolff J, Samulski R J. Reengineering a receptor footprint of adeno-associated virus enables selective and systemic gene transfer to muscle. Nat Biotechnol. 2010 Jan. 28(1):79-82. (AAV2i8)
[0836] 50. Vance M, Llanga T, Bennett W, Woodard K, Murlidharan G, Chungfat N, Asokan A, Gilger B, Kurtzberg J, Sarnulski R J, Hirsch M L. AAV Gene Therapy for MPS1-associated Corneal Blindness. Sci Rep. 2016 Feb. 22:6:22131. (AAV8G9)
[0837] 51. Zhong L, Li B, Mah C S, Govindasarny L, Agbandje-McKenna M, Cooper M, Herzog R W, Zolotukhin I, Warrington K H Jr, Weigel-Van Aken K A, Hobbs J A, Zolotukhin S, Muzyczka N, Srivastava A. Next generation of adeno-associated virus 2 vectors: point mutations in tyrosines lead to high-efficiency transduction at lower doses. Proc Natl Acad Sci USA. 2008 Jun. 3:105(22):7827-32. (AAV2 tyrosine mutants AAV2 Y-F)
[0838] 52. Petrs-Silva H, Dinculescu A, Li Q, Min S H, Chiodo V, Pang J J, Zhong L, Zolotukhin S, Srivastava A, Lewin A S, Hauswirth W W. High-efficiency transduction of the mouse retina by tyrosine-mutant AAV serotype vectors. Mol Ther. 2009 Mar. 1 7(3):463-71. (AAV8 Y-F and AAV9 Y-F)
[0839] 53. Qiao C, Zhang W, Yuan Z, Shin J H, Li J, Jayandharan G R, Zhong L, Srivastava A, Xiao X, Duan D. Adena-associated virus serotype 6 capsid tyrosine-to-phenylalanine mutations improve gene transfer to skeletal muscle. Hum Gene Ther. 2010 Oct: 21(10):1343-8 (AAV6 Y-F)
[0840] 54. Carlon M, Toelen J, Van der Perren A, Vandenberghe L H, Reumers V, Sbragia L, Gijsbers R, Baekelandt V, Himmelreich U, Wilson J M, Deprest J, Debyser Z. Efficient gene transfer into the mouse lung by fetal intratracheal injection of rAAV2/6.2. Mol Ther. 2010 Dec: 18(12):2130-8. (AAV6.2) PCT Publication No. WO2013158879A1 (lysine mutants)
[0841] 55. Piacentino III, Valentino, et al. “X-linked inhibitor of apoptosis protein-mediated attenuation of apoptosis, using a novel cardiac-enhanced adeno-associated viral vector.” Human gene therapy 23.6 (2012): 635-646.
[0842] 56. Hirschhorn et al. (2001) “Glycogen Storage Disease Type II: Acid Alpha-glucosidase (Acid Maltase) Deficiency,” in Scriver et al., eds., The Metabolic and Molecular Basis of Inherited Disease, 8th Ed., New York: McGraw-Hill, 3389-3420.
[0843] 57. Hermonat, P. L., Labow, M. A., Wright, R., Berns, K. I., & Muzyczka, N. (1984). Genetics of adeno-associated virus: isolation and preliminary characterization of adeno-associated virus type 2 mutants. Journal of Virology, 51(2), 329-339. https://doi.org/10.1128/jvi.51.2.329-339.1984
[0844] 58. West, M. H., Trempe, J. P., Tratschin, J. D., & Carter, B. J. (1987). Gene expression in adeno-associated virus vectors: the effects of chimeric mRNA structure, helper virus, and adenovirus VA1 RNA. Virology, 160(1), 38-47. https://doi.org/10.1016/0042-6822(87)90041-9
[0845] 59. Bohenzky, R. A., & Berns, K. I. (1989). Interactions between the termini of adeno-associated virus DNA. Journal of Molecular Biology, 206(1), 91-100. https://doi.org/10.1016/0022-2836(89)90526-3
[0846] 60. Flotte, T. R., Solow, R., Owens, R. A., Afione, S., Zeitlin, P. L., & Carter, B. J. (1992). Gene expression from adeno-associated virus vectors in airway epithelial cells. American Journal of Respiratory Cell and Molecular Biology, 7(3), 349-356. https://doi.org/10.1165/ajrcmb/7.3.349
[0847] 61. Flotte, T. R., Afione, S. A., Solow, R., Drumm, M. L., Markakis, D., Guggino, W. B., Zeitlin, P. L., & Carter, B. J. (1993). Expression of the cystic fibrosis transmembrane conductance regulator from a novel adeno-associated virus promoter. Journal of Biological Chemistry, 268(5), 3781-3790.
[0848] 62. Flotte, T., Carter, B., Conrad, C., Guggino, W., Reynolds, T., Rosenstein, B., Taylor, G., Walden, S., & Wetzel, R. (1996). A phase I study of an adeno-associated Virus-CFTR gene vector in adult C F patients with mild lung disease. In Human Gene Therapy (Vol. 7, Issue 9, pp. 1145-1159). Mary Ann Liebert Inc. https://doi.org/10.1089/hum.1996.7.9-1145
[0849] 63. Rubenstein, R. C., McVeigh, U., Flotte, T. R., Guggino, W. B., & Zeitlin, P. L. (1997). CFTR gene transduction in neonatal rabbits using an adeno-associated virus (AAV) vector. Gene Therapy, 4(5), 384-392. https://doi.org/10.1038/sj.gt.3300417
[0850] 64. Haberman, R. P., McCown, T. J., & Samulski, R. J. (1998). Inducible long-term gene expression in brain with adeno-associated virus gene transfer. Gene Therapy, 5(12), 1604-1611. https://doi.org/10.1038/sj.gt.3300782
[0851] 65. Wang, D., Fischer, H., Zhang, L., Fan, P., Ding, R. X., & Dong, J. (1999). Efficient CFTR expression from AAV vectors packaged with promoters—The second generation. Gene Therapy, 6(4), 667-675. https://doi.org/10.1038/sj.gt.3300856
[0852] 66. Hsiao, C. D., Hsieh, F. J., & Tsai, H. J. (2001). Enhanced expression and stable transmission of transgenes flanked by inverted terminal repeats from adeno-associated virus in zebrafish. Developmental Dynamics: An Official Publication of the American Association of Anatomists,
[0853] 220(4), 323-336. https://doi.org/10.1002/dvdy.1113
[0854] 67. Davidoff, A. M., Ng, C. Y. C., Zhou, J., Spence, Y., & Nathwani, A. C. (2003). Sex significantly influences transduction of murine liver by recombinant adeno-associated viral vectors through an androgen-dependent pathway. Blood, 102(2), 480-488. https://doi.org/10.1182/blood-2002-09-2889
[0855] 68. Farris, K. D., & Pintel, D. J. (2008). Improved splicing of adeno-associated viral (AAV) capsid protein-supplying pre-mRNAs leads to increased recombinant AAV vector production. Human Gene Therapy, 19(12), 1421-1427. https://doi.org/10.1089/hum.2008.118
[0856] 69. Li, C., Hirsch, M., Carter, P., Asokan, A., Zhou, X., Wu, Z., & Samulski, R. J. (2009). A small regulatory element from chromosome 19 enhances liver-specific gene expression. Gene Therapy, 16(1), 43-51. https://doi.org/10.1038/gt.2008.134
[0857] 70. Dean, J., Plante, J., Huggins, G. S., Snyder, R. O., & Aikawa, R. (2009). Role of cyclic AMP-dependent kinase response element-binding protein in recombinant adeno-associated virus-mediated transduction of heart muscle cells. Human Gene Therapy, 20(9), 1005-1012. https://doi.org/10.1089/hum.2009.054
[0858] 71. Ling, C., Wang, Y., Lu, Y., Wang, L., Jayandharan, G. R., Aslanidi, G. V., Li, B., Cheng, B., Ma, W., Lentz, T., Ling, C., Xiao, X., Samulski, R. J., Muzyczka, N., & Srivastava, A. (2015). Enhanced Transgene Expression from Recombinant Single-Stranded D-Sequence-Substituted Adeno-Associated Virus Vectors in Human Cell Lines In Vitro and in Murine Hepatocytes In Vivo. Journal of Virology, 89(2), 952-961. https://doi.org/10.1128/jvi.02581-14
[0859] 72. Wang, L., Yin, Z., Wang, Y., Lu, Y., Zhang, D., Srivastava, A., Ling, C., Aslanidi, G. V., & Ling, C. (2015). Productive life cycle of adeno-associated virus serotype 2 in the complete absence of a conventional polyadenylation signal. Journal of General Virology, 96(9), 2780-2787. https://doi.org/10.1099/jgv.0.000229
[0860] 73. Powell, S. K., Rivera-Soto, R., & Gray, S. J. (2015). Viral expression cassette elements to enhance transgene target specificity and expression in gene therapy. Discovery Medicine, 19(102), 49-57. https://www.ncbi.nlm.nih.gov/pmc/articles/PMC4505817/
[0861] 74. Stutika, C., Mietzsch, M., Gogol-D6ring, A., Weger, S., Sohn, M., Chen, W., & Heilbronn, R. (2016). Comprehensive Small RNA-Seq of Adeno-Associated Virus (AAV)-Infected Human Cells Detects Patterns of Novel, Non-Coding AAV RNAs in the Absence of Cellular miRNA Regulation. PloS One, 11(9), e0161454. https://doi.org/10.1371/journal.pone.0161454
[0862] 75. Weger, S., Hammer, E., Gonsior, M., Stutika, C., & Heilbronn, R. (2016). A Regulatory Element Near the 3′ End of the Adeno-Associated Virus rep Gene Inhibits Adenovirus Replication in cis by Means of p40 Promoter-Associated Short Transcripts. Journal of Virology, 90(8), 3981-3993. https://doi.org/10.1128/jvi.03120-15
[0863] 76. Logan, G. J., Dane, A. P., Hallwirth, C. V, Smyth, C. M., Wilkie, E. E., Amaya, A. K., Zhu, E., Khandekar, N., Ginn, S. L., Liao, S. H. Y., Cunningham, S. C., Sasaki, N., Cabanes-Creus, M., Tam, P. P. L., Russell, D. W., Lisowski, L., & Alexander, I. E. (2017). Identification of liver-specific enhancer-promoter activity in the 3′ untranslated region of the wild-type AAV2 genome. Nature Genetics, 49(8), 1267-1273. https://doi.org/10.1038/ng.3893
[0864] 77. Lu, J., Williams, J. A., Luke, J., Zhang, F., Chu, K., & Kay, M. A. (2017). A 5′ noncoding exon containing engineered intron enhances transgene expression from recombinant AAV vectors in vivo. Human Gene Therapy, 28(1), 125-134. https://doi.org/10.1089/hum.2016.140
[0865] 78. Xu, H., Hao, S., Zhang, J., Chen, Z., Wang, H., & Guan, W. (2017). The formation and modification of chromatin-like structure of human parvovirus B19 regulate viral genome replication and RNA processing. Virus Research, 232, 134-138. https://doi.org/10.1016/j.virusres.2017.03.001
[0866] 79. Julien, L., Chassagne, J., Peccate, C., Lorain, S., Pidtri-Rouxel, F., Danos, O., & Benkhelifa-Ziyyat, S. (2018). RFX1 and RFX3 Transcription Factors Interact with the D Sequence of Adeno-Associated Virus Inverted Terminal Repeat and Regulate AAV Transduction. Scientific Reports, 8(1). https://doi.org/10.1038/s41598-017-18604-3
[0867] 80. Wilmott, P., Lisowski, L., Alexander, I. E., & Logan, G. J. (2019). A User's Guide to the Inverted Terminal Repeats of Adeno-Associated Virus. Human Gene Therapy Methods, 30(6), 206-213. https://doi.org/10.1089/hgtb.2019.276
[0868] 81. Lu, L., Zhang, F., Li, Y., Yang, A., Guan, C., Ding, X., Liu, Y., Liu, Y., Zhang, C.-Y., Li, L., & Zhang, Q. (2019). Dendritic targeted mRNA expression via a cis-acting RNA UTR element. Biochemical and Biophysical Research Communications, 509(2), 402-406. https://doi.org/10.1016/j.bbrc.2018.12.137
[0869] 82. Earley, L. F., Conatser, L. M., Lue, V. M., Dobbins, A. L., Li, C., Hirsch, M. L., & Samulski, R. J. (2020). Adeno-Associated Virus Serotype-Specific Inverted Terminal Repeat Sequence Role in Vector Transgene Expression. Human Gene Therapy, 31(3-4), 151-162. https://doi.org/10.1089/hum.2019.274

1. A recombinant adenovirus associated (AAV) vector comprising in its genome:
a. 5′ and 3′ AAV inverted terminal repeats (ITR) sequences, and
b. located between the 5′ and 3′ ITRs, a heterologous nucleic acid sequence encoding a polypeptide comprising an alpha-glucosidase (GAA) polypeptide, wherein the heterologous nucleic acid is operatively linked to a liver-specific promoter selected from any one of:
i. CRM_SP0412 (SEQ ID NO: 86) or SP0412 (SEQ ID NO: 91) or a functional variant or functional fragment thereof having at least 60% activity to SEQ ID NO: 86 or SEQ ID NO: 91,
ii. SP0422 (SEQ ID NO: 92) or a functional variant or functional fragment thereof having at least 60% activity to SEQ ID NO: 92,
iii. CRM_SP0239 (SEQ ID NO: 87) or SP0239 (SEQ ID NO: 93) or SP0238-UTR (SEQ ID NO: 147) or a functional variant or functional fragment thereof having at least 60% activity to SEQ ID NO: 87, SEQ ID NO: 93 or SEQ ID NO: 147;
iv. CRM_SP0265 (SP0131_A1) (SEQ ID NO: 88) or SP0265 (LVR_SP0131_A1) (SEQ ID NO: 94) or SP0265-UTR (SEQ ID NO: 146) or a functional variant or functional fragment thereof having at least 60% activity to SEQ ID NO: 88, SEQ ID NO: 94 or SEQ ID NO: 146;
v. CRM_SP0240 (SEQ ID NO: 89) or SP0240 (SEQ ID NO: 95) or SP0240-UTR (SEQ ID NO: 148) or a functional variant or functional fragment thereof having at least 60% activity to SEQ ID NO: 89, SEQ ID NO: 95 or SEQ ID NO: 148;
vi. CRM_SP0246 (SEQ ID NO: 90) or SP0246 (SEQ ID NO: 96) or SP0246-UTR (SEQ ID NO: 149) or a functional variant or functional fragment thereof having at least 60% activity to SEQ ID NO: 90, SEQ ID NO: 96 or SEQ ID NO: 149.

2. The recombinant AAV vector of claim 1, wherein the heterologous nucleic acid sequence encodes a fusion protein comprising a secretory signal fused to the GAA polypeptide.

3. The recombinant AAV vector of claim 2, wherein the AAV genome comprises, in the 5′ to 3′ direction:
a. a 5′ ITR,
b. a liver-specific promoter sequence,
c. an intron sequence,
d. a nucleic acid encoding a secretory signal peptide,
e. a nucleic acid encoding an alpha-glucosidase (GAA) polypeptide,
f. a poly A sequence, and
g. a 3′ ITR.

4. The recombinant AAV vector of claim 2, wherein nucleic acid encoding the secretory signal peptide encodes a signal sequence selected from any of: an AAT signal peptide, a fibronectin signal peptide (FN1), a GAA leader sequence, a IL-2 wt leader sequence, modified IL-2 leader sequence, IL2(1-3) leader sequence, IgG leader sequence, a AAT leader sequence, or an active fragment thereof having secretory signal activity.

5.-7. (canceled)

8. The recombinant AAV vector of claim 1, wherein the nucleic acid sequence encodes a wild-type human GAA polypeptide or a modified human GAA polypeptide, or human codon optimized GAA gene (coGAA) or a modified GAA nucleic acid sequence.

9. (canceled)

10. The recombinant AAV vector of claim 1, wherein the nucleic acid sequence encoding the GAA polypeptide is modified from SEQ ID NO: 11 for any one or more of: (i) codon optimized for enhanced expression in vivo, (ii) reduce CpG islands, (iii) modification of STOP sequences, (iv) reduction of alternative reading frames, and (v) to reduce the innate immune response.

11. The recombinant AAV vector of claim 1, wherein the nucleic acid sequence encoding the GAA polypeptide encodes a GAA polypeptide which comprises at least one or at least 2 amino acid modifications selected from; H201L, H199R or R233H of SEQ ID NO: 10.

12.-17. (canceled)

18. The recombinant AAV vector of claim 3, wherein the intron sequence comprises a MVM sequence or a HBB2 sequence or a SV40 sequence.

19. The recombinant AAV vector of claim 1, wherein the ITR comprises an insertion, deletion or substitution or one or more CpG islands in the ITR are deleted.

20. (canceled)

21. The recombinant AAV vector of claim 2, wherein
a. the nucleic acid encoding the secretory signal peptide is selected from any of the group consisting of:
AAT signal peptide (e.g., SEQ ID NO: 17), or an active fragment thereof having secretory signal activity, e.g., a nucleic acid encoding an amino acid sequence that has at least about sequence identity to SEQ ID NO: 17-22;
a fibronectin signal peptide (FN1) (e.g., SEQ ID NO: 18-21), or an active fragment thereof having secretory signal activity, e.g., a nucleic acid encoding an amino acid sequence that has at least about 90% sequence identity to SEQ ID NO: 18-21;
a cognate GAA signal peptide (SEQ ID NO: 175), or an active fragment thereof having secretory signal activity, e.g., a nucleic acid encoding an amino acid sequence that has at least about sequence identity to SEQ ID NO: 175;
an hIGF2 signal peptide (e.g., SEQ ID NO: 22), or an active fragment thereof having secretory signal activity, e.g., a nucleic acid encoding an amino acid sequence that has at least about 90% sequence identity to SEQ ID NO: 22;
a IgG1 leader peptide (SEQ ID NO: 177), or an active fragment thereof having secretory signal activity, e.g., a nucleic acid encoding an amino acid sequence that has at least about 90% sequence identity to SEQ ID NO: 177;
wtIL2 leader peptide (SEQ ID NO: 179), or an active fragment thereof having secretory signal activity, e.g., a nucleic acid encoding an amino acid sequence that has at least about 90% sequence identity to SEQ ID NO: 179;
mutant IL2 leader peptide (SEQ ID NO: 181) or an active fragment thereof having secretory signal activity, e.g., a nucleic acid encoding an amino acid sequence that has at least about 90% sequence identity to SEQ ID NO: 181; and
b. the nucleic acid encoding the GAA polypeptide is selected from any of the group consisting of: SEQ ID NO: 11, SEQ ID NO: 72, SEQ ID NO: 74, SEQ ID NO: 75, SEQ ID NO: 76, SEQ ID NO: 82 or SEQ ID NO: 182 or a nucleic acid sequence having at least about 90% sequence identity to SEQ ID NO: 11, SEQ ID NO: 72, SEQ ID NO: 74, SEQ ID NO: 75, SEQ ID NO: 76, SEQ ID NO: 82 or SEQ ID NO: 182.

22. (canceled)

23. (canceled)

24. The recombinant AAV vector of claim 1, wherein the recombinant AAV vector is a chimeric AAV vector, a haploid AAV vector, a hybrid AAV vector or a polyploid AAV vector, or a rational haploid vector, a mosaic AAV vector, a chemically modified AAV vector, or a AAV vector from any AAV serotype.

25. (canceled)

26. The recombinant AAV vector of claim 1, wherein the recombinant AAV vector is selected from the group consisting of: a AAVXL32 vector, a AAVXL32.1 vector, a AAV3b vector, a AAV8 vector, or a haploid AAV8 vector comprising at least one AAV8 capsid protein.

27. The recombinant AAV vector of claim 24, wherein the recombinant vector comprises a capsid protein selected from the serotypes AAV3, is-AAV3b, AAV8.

28.-37. (canceled)

38. The recombinant AAV vector of claim 1, wherein the nucleic acid sequence encodes a wild-type GAA polypeptide of SEQ ID NO: 10, or a modified GAA polypeptide having at least about 85% sequence homology to SEQ ID NO: 10.

39. The recombinant AAV vector of claim 1, wherein the nucleic acid sequence encodes a GAA polypeptide which comprises at least all three amino acid modifications selected from; H201L, H199R or R233H of SEQ ID NO: 10.

40. The recombinant AAV vector of claim 39, wherein the nucleic acid sequence encoding the GAA polypeptide is the human GAA gene or a human codon optimized GAA gene (coGAA) or a modified GAA nucleic acid sequence, or a nucleic acid sequence encoding the GAA polypeptide is codon optimized to reduce CpG islands or to reduce the innate immune response, or to reduce the innate immune response and reduce the innate immune response.

41.-48. (canceled)

49. A pharmaceutical composition comprising the recombinant AAV vector of claim 1 in a pharmaceutically acceptable carrier.

50. A nucleic acid sequence comprising:
a liver specific promoter operatively linked to a nucleic acid sequence encoding a GAA polypeptide, wherein the liver specific promoter is selected from any one of the liver specific promoters of: wherein the liver specific promoter is selected from any of:
i. CRM_SP0412 (SEQ ID NO: 86) or SP0412 (SEQ ID NO: 91) or a functional variant or functional fragment thereof having at least 60% activity to SEQ ID NO: 86 or SEQ ID NO: 91, or
ii. SP0422 (SEQ ID NO: 92) or a functional variant or functional fragment thereof having at least 60% activity to SEQ ID NO: 92,
iii. CRM_SP0239 (SEQ ID NO: 87) or SP0239 (SEQ ID NO: 93) or SP0238-UTR (SEQ ID NO: 147) or a functional variant or functional fragment thereof having at least 60% activity to SEQ ID NO: 87, SEQ ID NO: 93 or SEQ ID NO: 147;
iv. CRM_SP0265 (SP0131_A1) (SEQ ID NO: 88) or SP0265 (LVR_SP0131_A1) (SEQ ID NO: 94) or SP0265-UTR (SEQ ID NO: 146) or a functional variant or functional fragment thereof having at least 60% activity to SEQ ID NO: 88, SEQ ID NO: 94 or SEQ ID NO: 146;
v. CRM_SP0240 (SEQ ID NO: 89) or SP0240 (SEQ ID NO: 95) or SP0240-UTR (SEQ ID NO: 148) or a functional variant or functional fragment thereof having at least 60% activity to SEQ ID NO: 89, SEQ ID NO: 95 or SEQ ID NO: 148; or
vi. CRM_SP0246 (SEQ ID NO: 90) or SP0246 (SEQ ID NO: 96) or SP0246-UTR (SEQ ID NO: 149) or a functional variant or functional fragment thereof having at least 60% activity to SEQ ID NO: 90, SEQ ID NO: 96 or SEQ ID NO: 149.

51. The nucleic acid sequence of claim 50, further comprising:
a. 5′ and 3′ AAV inverted terminal repeats (ITR) nucleic acid sequences, wherein the 5′ and the 3′ ITR sequences flank the heterologous nucleic acid sequence encoding a alpha-glucosidase (GAA) polypeptide operatively linked to the liver-specific promoter.

52. (canceled)

53. (canceled)

54. (canceled)

55. The nucleic acid sequence of claim 50, wherein the nucleic acid sequence encoding the GAA polypeptide is the human GAA gene or a human codon optimized GAA gene (coGAA) or a modified GAA nucleic acid sequence, or wherein the nucleic acid sequence encoding the GAA polypeptide is modified from SEQ ID NO: 11 for any one or more of: (i) codon optimized for enhanced expression in vivo, (ii) reduce CpG islands, (iii) modification of STOP sequences, (iv) reduction of alternative reading frames, and (v) to reduce the innate immune response.

56.-59. (canceled)

60. The nucleic acid sequence of claim 50, wherein the nucleic acid encoding the GAA polypeptide is selected from any of SEQ ID NO: 74 (codon optimized 1), SEQ ID NO: 75 (codon optimized 2), SEQ ID NO: 76 (codon optimized 3), and SEQ ID NO: 182 (mod hGAA) a nucleic acid sequence having at least 90%, identity thereto.

61. The nucleic acid sequence of claim 50, wherein the nucleic acid encodes a GAA polypeptide which comprises at least one, at least 2 or at least all three amino acid modifications selected from: H201L, H199R or R233H of SEQ ID NO: 10.

62. A method to treat a subject with a glycogen storage disease type II (GSD II, Pompe Disease, Acid Maltase Deficiency) or having a deficiency in alpha-glucosidase (GAA) polypeptide, comprising administering the recombinant AAV vector of claim 1 to the subject.

63. (canceled)

64. (canceled)

65. The method of claim 62, wherein the recombinant AAV vector is a chimeric AAV vector, haploid AAV vector, a hybrid AAV vector or polyploid AAV vector, a rational haploid vector, a mosaic AAV vector, a chemically modified AAV vector, or a AAV vector from any AAV serotypes.

66. (canceled)

67. The method of claim 62, wherein the recombinant AAV vector is selected from any of: a AAVXL32 vector, a AAVXL32.1 vector, a AAV8 vector and a haploid AAV8 vector comprising at least one AAV8 capsid protein.

68.-73. (canceled)

The application's sequence listing, which the Patent Office published only in electronic form, follows.

SEQUENCE LISTING (447 sequences)

SEQ ID NO: 1 - DNA, 201 bp, Homo sapiens
gcttaccgccccagtgagaccctgtgcggcggggagctggtggacaccctccagttcgtctgtggggaccgcggcttctacttcagcaggcccgcaagccgtgtgagccgtcgcagccgtggcatcgttgaggagtgctgtttccgcagctgtgacctggccctcctggagacgtactgtgctacccccgccaagtccgag

SEQ ID NO: 2 - DNA, 183 bp, Artificial Sequence
  Description of Artificial Sequence: Synthetic polynucleotide
gctctgtgcggcggggagctggtggacaccctccagttcgtctgtggggaccgcggcttctacttcagcaggcccgcaagccgtgtgagccgtcgcagccgtggcatcgttgaggagtgctgtttccgcagctgtgacctggccctcctggagacgtactgtgctacccccgccaagtccgag

SEQ ID NO: 3 - DNA, 180 bp, Artificial Sequence
  Description of Artificial Sequence: Synthetic polynucleotide
ctgtgcggcggggagctggtggacaccctccagttcgtctgtggggaccgcggcttctacttcagcaggcccgcaagccgtgtgagccgtcgcagccgtggcatcgttgaggagtgctgtttccgcagctgtgacctggccctcctggagacgtactgtgctacccccgccaagtccgag

SEQ ID NO: 4 - DNA, 201 bp, Artificial Sequence
  Description of Artificial Sequence: Synthetic polynucleotide
gcttaccgccccagtgagaccctgtgcggcggggagctggtggacaccctccagttcgtctgtggggaccgcggcttctacttcagcaggcccgcaagccgtgtgagccgtcgcagccgtggcatcatggaggagtgctgtttccgcagctgtgacctggccctcctggagacgtactgtgctacccccgccaagtccgag

SEQ ID NO: 5 - protein, 67 aa, Homo sapiens
AYRPSETLCGGELVDTLQFVCGDRGFYFSRPASRVSRRSRGIVEECCFRSCDLALLETYCATPAKSE

SEQ ID NO: 6 - protein, 61 aa, Artificial Sequence
  Description of Artificial Sequence: Synthetic polypeptide
ALCGGELVDTLQFVCGDRGFYFSRPASRVSRRSRGIVEECCFRSCDLALLETYCATPAKSE

SEQ ID NO: 7 - protein, 60 aa, Artificial Sequence
  Description of Artificial Sequence: Synthetic polypeptide
LCGGELVDTLQFVCGDRGFYFSRPASRVSRRSRGIVEECCFRSCDLALLETYCATPAKSE

SEQ ID NO: 8 - protein, 24 aa, Artificial Sequence
  Description of Artificial Sequence: Synthetic peptide
EECCFRSCDLALLETYCATPAKSE

SEQ ID NO: 9 - protein, 67 aa, Artificial Sequence
  Description of Artificial Sequence: Synthetic polypeptide
AYRPSETLCGGELVDTLQFVCGDRGFYFSRPASRVSRRSRGIMEECCFRSCDLALLETYCATPAKSE

SEQ ID NO: 10 - protein, 952 aa, Homo sapiens
MGVRHPPCSHRLLAVCALVSLATAALLGHILLHDFLLVPRELSGSSPVLEETHPAHQQGASRPGPRDAQAHPGRPRAVPTQCDVPPNSRFDCAPDKAITQEQCEARGCCYIPAKQGLQGAQMGQPWCFFPPSYPSYKLENLSSSEMGYTATLTRTTPTFFPKDILTLRLDVMMETENRLHFTIKDPANRRYEVPLETPHVHSRAPSPLYSVEFSEEPFGVIVRRQLDGRVLLNTTVAPLFFADQFLQLSTSLPSQYITGLAEHLSPLMLSTSWTRITLWNRDLAPTPGANLYGSHPFYLALEDGGSAHGVFLLNSNAMDVVLQPSPALSWRSTGGILDVYIFLGPEPKSVVQQYLDVVGYPFMPPYWGLGFHLCRWGYSSTAITRQVVENMTRAHFPLDVQWNDLDYMDSRRDFTFNKDGFRDFPAMVQELHQGGRRYMMIVDPAISSSGPAGSYRPYDEGLRRGVFITNETGQPLIGKVWPGSTAFPDFTNPTALAWWEDMVAEFHDQVPFDGMWIDMNEPSNFIRGSEDGCPNNELENPPYVPGVVGGTLQAATICASSHQFLSTHYNLHNLYGLTEAIASHRALVKARGTRPFVISRSTFAGHGRYAGHWTGDVWSSWEQLASSVPEILQFNLLGVPLVGADVCGFLGNTSEELCVRWTQLGAFYPFMRNHNSLLSLPQEPYSFSEPAQQAMRKALTLRYALLPHLYTLFHQAHVAGETVARPLFLEFPKDSSTWTVDHQLLWGEALLITPVLQAGKAEVTGYFPLGTWYDLQTVPVEALGSLPPPPAAPREPAIHSEGQWVTLPAPLDTINVHLRAGYIIPLQGPGLTTTESRQQPMALAVALTKGGEARGELFWDDGESLEVLERGAYTQVIFLARNNTIVNELVRVTSEGAGLQLQKVTVLGVATAPQQVLSNGVPVSNFTYSPDTKVLDICVSLLMGEQFLVSWC

SEQ ID NO: 11 - DNA, 3837 bp, Homo sapiens
gccccgcgacgagctcccgccggtcacgtgacccgcctctgcgcgcccccgggcacgaccccggagtctccgcgggcggccagggcgcgcgtgcgcggaggtgagccgggccggggctgcggggcttccctgagcgcgggccgggtcggtggggcggtcggctgcccgcgcggcctctcagttgggaaagctgaggttgtcgccggggccgcgggtggaggtcggggatgaggcagcaggtaggacagtgacctcggtgacgcgaaggaccccggccacctctaggttctcctcgtccgcccgttgttcagcgagggaggctctgcgcgtgccgcagctgacggggaaactgaggcacggagcgggcctgtaggagctgtccaggccatctccaaccatgggagtgaggcacccgccctgctcccaccggctcctggccgtctgcgccctcgtgtccttggcaaccgctgcactcctggggcacatcctactccatgatttcctgctggttccccgagagctgagtggctcctccccagtcctggaggagactcacccagctcaccagcagggagccagcagaccagggccccgggatgcccaggcacaccccggccgtcccagagcagtgcccacacagtgcgacgtcccccccaacagccgcttcgattgcgcccctgacaaggccatcacccaggaacagtgcgaggcccgcggctgttgctacatccctgcaaagcaggggctgcagggagcccagatggggcagccctggtgcttcttcccacccagctaccccagctacaagctggagaacctgagctcctctgaaatgggctacacggccaccctgacccgtaccacccccaccttcttccccaaggacatcctgaccctgcggctggacgtgatgatggagactgagaaccgcctccacttcacgatcaaagatccagctaacaggcgctacgaggtgcccttggagaccccgcatgtccacagccgggcaccgtccccactctacagcgtggagttctccgaggagcccttcggggtgatcgtgcgccggcagctggacggccgcgtgctgctgaacacgacggtggcgcccctgttctttgcggaccagttccttcagctgtccacctcgctgccctcgcagtatatcacaggcctcgccgagcacctcagtcccctgatgctcagcaccagctggaccaggatcaccctgtggaaccgggaccttgcgcccacgcccggtgcgaacctctacgggtctcaccctttctacctggcgctggaggacggcgggtcggcacacggggtgttcctgctaaacagcaatgccatggatgtggtcctgcagccgagccctgcccttagctggaggtcgacaggtgggatcctggatgtctacatcttcctgggcccagagcccaagagcgtggtgcagcagtacctggacgttgtgggatacccgttcatgccgccatactggggcctgggcttccacctgtgccgctggggctactcctccaccgctatcacccgccaggtggtggagaacatgaccagggcccacttccccctggacgtccagtggaacgacctggactacatggactcccggagggacttcacgttcaacaaggatggcttccgggacttcccggccatggtgcaggagctgcaccagggcggccggcgctacatgatgatcgtggatcctgccatcagcagctcgggccctgccgggagctacaggccctacgacgagggtctgcggaggggggttttcatcaccaacgagaccggccagccgctgattgggaaggtatggcccgggtccactgccttccccgacttcaccaaccccacagccctggcctggtgggaggacatggtggctgagttccatgaccaggtgcccttcgacggcatgtggattgacatgaacgagccttccaacttcatcaggggctctgaggacggctgccccaacaatgagctggagaacccaccctacgtgcctggggtggttggggggaccctccaggcggccaccatctgtgcctccagccaccagtttctctccacacactacaacctgcacaacctctacggcctgaccgaagccatcgcctcccacagggcgctggtgaaggctcgggggacacgcccatttgtgatctcccgctcgacctttgctggccacggccgatacgccggccactggacgggggacgtgtggagctcctgggagcagctcgcctcctccgtgccagaaatcctgcagtttaacctgctgggggtgcctctggtcggggccgacgtctgcggcttcctgggcaacacctcagaggagctgtgtgtgcgctggacccagctgggggccttctaccccttcatgcggaaccacaacagcctgctcagtctgccccaggagccgtacagcttcagcgagccggcccagcaggccatgaggaaggccctcaccctgcgctacgcactcctcccccacctctacacactgttccaccaggcccacgtcgcgggggagaccgtggcccggcccctcttcctggagttccccaaggactctagcacctggactgtggaccaccagctcctgtggggggaggccctgctcatcaccccagtgctccaggccgggaaggccgaagtgactggctacttccccttgggcacatggtacgacctgcagacggtgccagtagaggcccttggcagcctcccacccccacctgcagctccccgtgagccagccatccacagcgaggggcagtgggtgacgctgccggcccccctggacaccatcaacgtccacctccgggctgggtacatcatccccctgcagggccctggcctcacaaccacagagtcccgccagcagcccatggccctggctgtggccctgaccaagggtggggaggcccgaggggagctgttctgggacgatggagagagcctggaagtgctggagcgaggggcctacacacaggtcatcttcctggccaggaataacacgatcgtgaatgagctggtacgtgtgaccagtgagggagctggcctgcagctgcagaaggtgactgtcctgggcgtggccacggcgccccagcaggtcctctccaacggtgtccctgtctccaacttcacctacagccccgacaccaaggtcctggacatctgtgtctcgctgttgatgggagagcagtttctcgtcagctggtgttagccgggcggagtgtgttagtctctccagagggaggctggttccccagggaagcagagcctgtgtgcgggcagcagctgtgtgcgggcctgggggttgcatgtgtcacctggagctgggcactaaccattccaagccgccgcatcgcttgtttccacctcctgggccggggctctggcccccaacgtgtctaggagagctttctccctagatcgcactgtgggccggggccctggagggctgctctgtgttaataagattgtaaggtttgccctcctcacctgttgccggcatgcgggtagtattagccacccccctccatctgttcccagcaccggagaagggggtgctcaggtggaggtgtggggtatgcacctgagctcctgcttcgcgcctgctgctctgccccaacgcgaccgctgcccggctgcccagagggctggatgcctgccggtccccgagcaagcctgggaactcaggaaaattcacaggacttgggagattctaaatcttaagtgcaattatttttaataaaaggggcatttggaatcagcaaaaaaaaaaaaaaaaaaaaaaaaaaaaaa

SEQ ID NO: 12 - DNA, 349 bp, Unknown
  Description of Unknown: TTR Promoter (trunc) sequence
tcgagcttgggctgcaggtcgagggcactgggaggatgttgagtaagatggaaaactactgatgacccttgcagagacagagtattaggacatgtttgaacaggggccgggcgatcagcaggtagctctagaggatccccgtctgtctgcacatttcgtagagcgagtgttccgatactctaatctccctaggcaaggttcatatttgtgtaggttacttattctccttttgttgactaagtcaataatcagaatcagcaggtttggagtcagcttggcagggatcagcagcctgggttggaaggagggggtataaaagccccttcaccaggagaagccgtcacacaga

SEQ ID NO: 13 - DNA, 85 bp, Mouse parvovirus
ctagccctaaggtaagttggcgccgtttaagggatggttggttggtggggtattaatgtttaattaccttttttacaggcctgaa

SEQ ID NO: 14 - DNA, 441 bp, Artificial Sequence
  Description of Artificial Sequence: Synthetic polynucleotide
gtacacatattgaccaaatcagggtaattttgcatttgtaattttaaaaaatgctttcttcttttaatatacttttttgtttatcttatttctaatactttccctaatctctttctttcagggcaataatgatacaatgtatcatgcctctttgcaccattctaaagaataacagtgataatttctgggttaaggcaatagcaatatttctgcatataaatatttctgcatataaattgtaactgatgtaagaggtttcatattgctaatagcagctacaatccagctaccattctgcttttattttctggttgggataaggctggattattctgagtccaagctaggcccttttgctaatcttgttcatacctcttatcttcctcccacagctcctgggcaacctgctggtctctctgctggcccatcactttggcaaag

SEQ ID NO: 15 - DNA, 196 bp, Homo sapiens
gatctgtggcttctagctgcccgggtggcatccctgtgacccctccccagtgcctctcctggccctggaagttgccactccagtgcccaccagccttgtcctaataaaattaagttgcatcattttgtctgactaggtgtccttctataatattatggggtggaggggggtggtatggagcaaggggcaagttggg

SEQ ID NO: 16 - DNA, 251 bp, Artificial Sequence
  Description of Artificial Sequence: Synthetic polynucleotide
aaggccgacccgcgaatagtagatcccgcgagggcttgaatctatcacctagagtacaccctagagaatagctagctctcaatgactaaggactaaacttggtatttcgactgaagcctgtcccctcactgttggcgctaggaggagagttcgtagaaaggatagtacgatttaagtatctctaagccttgtgaagcactaaggttgcgtacagacgtgcttgaattacggataattcgggaaccttggga

SEQ ID NO: 17 - DNA, 72 bp, Homo sapiens
atgccgtcttctgtctcgtggggcatcctcctgctggcaggcctgtgctgcctggtccctgtctccctggct

SEQ ID NO: 18 - protein, 32 aa, Rattus norvegicus
MLRGPGPGRLLLLAVLCLGTSVRCTETGKSKR

SEQ ID NO: 19 - protein, 38 aa, Rattus norvegicus
MLRGPGPGRLLLLAVLCLGTSVRCTETGKSKRLALQIV

SEQ ID NO: 20 - protein, 26 aa, Homo sapiens
MLRGPGPGLLLLAVQCLGTAVPSTGA

SEQ ID NO: 21 - protein, 31 aa, Xenopus laevis
MRRGALTGLLLVLCLSVVLRAAPSATSKKRR

SEQ ID NO: 22 - DNA, 72 bp, Homo sapiens
atgggaatcccaatggggaagtcgatgctggtgcttctcaccttcttggccttcgcctcgtgctgcattgct

SEQ ID NO: 23 - DNA, 96 bp, Rattus norvegicus
atgctcaggggtccgggacccgggcggctgctgctgctagcagtcctgtgcctggggacatcggtgcgctgcaccgaaaccgggaagagcaagagg

SEQ ID NO: 24 - DNA, 114 bp, Rattus norvegicus
atgctcaggggtccgggacccgggcggctgctgctgctagcagtcctgtgcctggggacatcggtgcgctgcaccgaaaccgggaagagcaagaggcaggctcagcaaatcgtg

SEQ ID NO: 25 - DNA, 78 bp, Homo sapiens
atgcttaggggtccggggcccgggctgctgctgctggccgtccagtgcctggggacagcggtgccctccacgggagcc

SEQ ID NO: 26 - DNA, 93 bp, Xenopus laevis
atgcgccggggggccctgaccgggctgctcctggtcctgtgcctgagtgttgtgctacgtgcagccccctctgcaacaagcaagaagcgcagg

SEQ ID NO: 27 - protein, 17 aa, Rattus norvegicus
MTPLLLLAVLCLGTALA

SEQ ID NO: 28 - protein, 22 aa, Homo sapiens
MLSFVDTRTLLLLAVTLCLATC

SEQ ID NO: 29 - protein, 21 aa, Artificial Sequence
  Description of Artificial Sequence: Synthetic peptide
MWWRLWWLLLLLLLLWPMVWA

SEQ ID NO: 30 - DNA, 9 bp, Artificial Sequence
  Description of Artificial Sequence: Synthetic oligonucleotide
ggcgcgccg

SEQ ID NO: 31 - protein, 3 aa, Artificial Sequence
  Description of Artificial Sequence: Synthetic peptide
GAP

SEQ ID NO: 32 - protein, 6 aa, Artificial Sequence
  Description of Artificial Sequence: Synthetic peptide
GGGGGP

SEQ ID NO: 33 - protein, 5 aa, Artificial Sequence
  Description of Artificial Sequence: Synthetic peptide
GGGGS

SEQ ID NO: 34 - protein, 5 aa, Artificial Sequence
  Description of Artificial Sequence: Synthetic peptide
EAAAK

SEQ ID NO: 35 - protein, 11 aa, Artificial Sequence
  Description of Artificial Sequence: Synthetic peptide
GGGTVGDDDDK

SEQ ID NO: 36 - DNA, 167 bp, Artificial Sequence
  Description of Artificial Sequence: Synthetic polynucleotide
aggaacccctagtgatggagttggccactccctctctgcgcgctcgctcgctcactgaggcaatttgataaaaatcgtcaaattataaacaggctttgcctgtttagcctcagtgagcgagcgagcgcgcagagagggagtggccaactccatcactaggggttcct

SEQ ID NO: 37 - DNA, 143 bp, Artificial Sequence
  Description of Artificial Sequence: Synthetic polynucleotide
aggaacccctagtgatggagttggccactccctctctgcgcgctcgctcgctcactgagggataaaaatccaggctttgcctgcctcagtgagcgagcgagcgcgcagagagggagtggccaactccatcactaggggttcct

SEQ ID NO: 38 - DNA, 143 bp, Artificial Sequence; identical to SEQ ID NO: 37
  Description of Artificial Sequence: Synthetic polynucleotide

SEQ ID NO: 39 - DNA, 208 bp, Artificial Sequence
  Description of Artificial Sequence: Synthetic polynucleotide
aggaacccctagtgatggagttggccactccctctctgggattgggattgcgcgctcgctcgcgggattgggattgggattgggattgggattgggattgataaaaatcaatcccaatcccaatcccaatcccaatcccaatcccgcgagcgagcgcgcaatcccaatcccagagagggagtggccaactccatcactaggggttcct

SEQ ID NO: 40 - DNA, 199 bp, Artificial Sequence
  Description of Artificial Sequence: Synthetic polynucleotide
aggaacccctagtgatggagttggccactccctctctgcgcgctcgctcgctcgggattgggattgggattgggattgggattgggattgataaaaatcaatcccaatcccaatcccaatcccaatcccaatcccgcgagcgagcgcgcaggagagggagtggccaactccatcactaggggttcctaagcttattata

SEQ ID NO: 41 - DNA, 154 bp, Artificial Sequence
  Description of Artificial Sequence: Synthetic polynucleotide
aggaacccctagtgatggagttggccactccctctctgcgcgctcgctcgctcactgagggcgcctataaagataaaaatccaggctttgcctgcctcagttagcgagcgagcgcgcagagagggagtggccaactccatcactaggggttcct

SEQ ID NO: 42 - DNA, 127 bp, Artificial Sequence
  Description of Artificial Sequence: Synthetic polynucleotide
ctagtgatggagttggccactccctctctgcgcgctcgctcgctcactgagggataaaaatccaggctttgcctgcctcagtgagcgagcgagcgcgcagagagggagtggccaactccatcactag

SEQ ID NO: 43 - DNA, 2208 bp, Adeno-associated virus 3B
atggctgctgacggttatcttccagattggctcgaggacaacctttctgaaggcattcgtgagtggtgggctctgaaacctggagtccctcaacccaaagcgaaccaacaacaccaggacaaccgtcggggtcttgtgcttccgggttacaaatacctcggacccggtaacggactcgacaaaggagagccggtcaacgaggcggacgcggcagccctcgaacacgacaaagcttacgaccagcagctcaaggccggtgacaacccgtacctcaagtacaaccacgccgacgccgagtttcaggagcgtcttcaagaagatacgtcttttgggggcaaccttggcagagcagtcttccaggccaaaaagaggatccttgagcctcttggtctggttgaggaagcagctaaaacggctcctggaaagaagaggcctgtagatcagtctcctcaggaaccggactcatcatctggtgttggcaaatcgggcaaacagcctgccagaaaaagactaaatttcggtcagactggcgactcagagtcagtcccagaccctcaacctctcggagaaccaccagcagcccccacaagtttgggatctaatacaatggcttcaggcggtggcgcaccaatggcagacaataacgagggtgccgatggagtgggtaattcctcaggaaattggcattgcgattcccaatggctgggcgacagagtcatcaccaccagcaccagaacctgggccctgcccacttacaacaaccatctctacaagcaaatctccagccaatcaggagcttcaaacgacaaccactactttggctacagcaccccttgggggtattttgactttaacagattccactgccacttctcaccacgtgactggcagcgactcattaacaacaactggggattccggcccaagaaactcagcttcaagctcttcaacatccaagttaaagaggtcacgcagaacgatggcacgacgactattgccaataaccttaccagcacggttcaagtgtttacggactcggagtatcagctcccgtacgtgctcgggtcggcgcaccaaggctgtctcccgccgtttccagcggacgtcttcatggtccctcagtatggatacctcaccctgaacaacggaagtcaagcggtgggacgctcatccttttactgcctggagtacttcccttcgcagatgctaaggactggaaataacttccaattcagctataccttcgaggatgtaccttttcacagcagctacgctcacagccagagtttggatcgcttgatgaatcctcttattgatcagtatctgtactacctgaacagaacgcaaggaacaacctctggaacaaccaaccaatcacggctgctttttagccaggctgggcctcagtctatgtctttgcaggccagaaattggctacctgggccctgctaccggcaacagagactttcaaagactgctaacgacaacaacaacagtaactttccttggacagcggccagcaaatatcatctcaatggccgcgactcgctggtgaatccaggaccagctatggccagtcacaaggacgatgaagaaaaatttttccctatgcacggcaatctaatatttggcaaagaagggacaacggcaagtaacgcagaattagataatgtaatgattacggatgaagaagagattcgtaccaccaatcctgtggcaacagagcagtatggaactgtggcaaataacttgcagagctcaaatacagctcccacgactagaactgtcaatgatcagggggccttacctggcatggtgtggcaagatcgtgacgtgtaccttcaaggacctatctgggcaaagattcctcacacggatggacactttcatccttctcctctgatgggaggctttggactgaaacatccgcctcctcaaatcatgatcaaaaatactccggtaccggcaaatcctccgacgactttcagcccggccaagtttgcttcatttatcactcagtactccactggacaggtcagcgtggaaattgagtgggagctacagaaagaaaacagcaaacgttggaatccagagattcagtacacttccaactacaacaagtctgttaatgtggactttactgtagacactaatggtgtttatagtgaacctcgccctattggaacccggtatctcacacgaaacttg

SEQ ID NO: 44 - protein, 736 aa, Adeno-associated virus 3B
MAADGYLPDWLEDNLSEGIREWWALKPGVPQPKANQQHQDNRRGLVLPGYKYLGPGNGLDKGEPVNEADAAALEHDKAYDQQLKAGDNPYLKYNHADAEFQERLQEDTSFGGNLGRAVFQAKKRILEPLGLVEEAAKTAPGKKRPVDQSPQEPDSSSGVGKSGKQPARKRLNFGQTGDSESVPDPQPLGEPPAAPTSLGSNTMASGGGAPMADNNEGADGVGNSSGNWHCDSQWLGDRVITTSTRTWALPTYNNHLYKQISSQSGASNDNHYFGYSTPWGYFDFNRFHCHFSPRDWQRLINNNWGFRPKKLSFKLFNIQVKEVTQNDGTTTIANNLTSTVQVFTDSEYQLPYVLGSAHQGCLPPFPADVFMVPQYGYLTLNNGSQAVGRSSFYCLEYFPSQMLRTGNNFQFSYTFEDVPFHSSYAHSQSLDRLMNPLIDQYLYYLNRTQGTTSGTTNQSRLLFSQAGPQSMSLQARNWLPGPCYRQQRLSKTANDNNNSNFPWTAASKYHLNGRDSLVNPGPAMASHKDDEEKFFPMHGNLIFGKEGTTASNAELDNVMITDEEEIRTTNPVATEQYGTVANNLQSSNTAPTTRTVNDQGALPGMVWQDRDVYLQGPIWAKIPHTDGHFHPSPLMGGFGLKHPPPQIMIKNTPVPANPPTTFSPAKFASFITQYSTGQVSVEIEWELQKENSKRWNPEIQYTSNYNKSVNVDFTVDTNGVYSEPRPIGTRYLTRNL

SEQ ID NO: 45 - DNA, 2208 bp, Artificial Sequence
  Description of Artificial Sequence: Synthetic polynucleotide
atggctgctgacggttatcttccagattggctcgaggacaacctttctgaaggcattcgtgagtggtgggctctgaaacctggagtccctcaacccaaagcgaaccaacaacaccaggacaaccgtcggggtcttgtgcttccgggttacaaatacctcggacccggtaacggactcgacaaaggagagccggtcaacgaggcggacgcggcagccctcgaacacgacaaagcttacgaccagcagctcaaggccggtgacaacccgtacctcaagtacaaccacgccgacgccgagtttcaggagcgtcttcaagaagatacgtcttttgggggcaaccttggcagagcagtcttccaggccaaaaagaggatccttgagcctcttggtctggttgaggaagcagctaaaacggctcctggaaagaagaggcctgtagatcagtctcctcaggaaccggactcatcatctggtgttggcaaatcgggcaaacagcctgccagaaaaagactaaatttcggtcagactggcgactcagagtcagtcccagaccctcaacctctcggagaaccaccagcagcccccacaagtttgggatctaatacaatggcttcaggcggtggcgcaccaatggcagacaataacgagggtgccgatggagtgggtaattcctcaggaaattggcattgcgattcccaatggctgggcgacagagtcatcaccaccagcaccagaacctgggccctgcccacttacaacaaccatctctacaagcaaatctccagccaatcagatgcttcaaacgacaaccactactttggctacagcaccccttgggggtattttgactttaacagattccactgccacttctcaccacgtgactggcagcgactcattaacaacaactggggattccggcccaagaaactcagcttcaagctcttcaacatccaagttaaagaggtcacgcagaacgatggcacgacgactattgccaataaccttaccagcacggttcaagtgtttacggactcggagtatcagctcccgtacgtgctcgggtcggcgcaccaaggctgtctcccgccgtttccagcggacgtcttcatggtccctcagtatggatacctcaccctgaacaacggaagtcaagcggtgggacgctcatccttttactgcctggagtacttcccttcgcagatgctaaggactggaaataacttccaattcagctataccttcgaggatgtaccttttcacagcagctacgctcacagccagagtttggatcgcttgatgaatcctcttattgatcagtatctgtactacctgaacagaacgcaaggaacaacctctggaacaaccaaccaatcacggctgctttttagccaggctgggcctcagtctatgtctttgcaggccagaaattggctacctgggccctgctaccggcaacagagactttcaaagactgctaacgacaacaacaacagtaactttccttggacagcggccagcaaatatcatctcaatggccgcgactcgctggtgaatccaggaccagctatggccagtcacaaggacgatgaagaaaaatttttccctatgcacggcaatctaatatttggcaaagaagggacaacggcaagtaacgcagaattagataatgtaatgattacggatgaagaagagattcgtaccaccaatcctgtggcaacagagcagtatggaactgtggcaaataacttgcagagctcaaatacagctcccacgactagaactgtcaatgatcagggggccttacctggcatggtgtggcaagatcgtgacgtgtaccttcaaggacctatctgggcaaagattcctcacacggatggacactttcatccttctcctctgatgggaggctttggactgaaacatccgcctcctcaaatcatgatcaaaaatactccggtaccggcaaatcctccgacgactttcagcccggccaagtttgcttcatttatcactcagtactccactggacaggtcagcgtggaaattgagtgggagctacagaaagaaaacagcaaacgttggaatccagagattcagtacacttccaactacaacaagtctgttaatgtggactttactgtagacactaatggtgtttatagtgaacctcgccctattggaacccggtatctcacacgaaacttg

SEQ ID NO: 46 - protein, 736 aa, Artificial Sequence
  Description of Artificial Sequence: Synthetic polypeptide
MAADGYLPDWLEDNLSEGIREWWALKPGVPQPKANQQHQDNRRGLVLPGYKYLGPGNGLDKGEPVNEADAAALEHDKAYDQQLKAGDNPYLKYNHADAEFQERLQEDTSFGGNLGRAVFQAKKRILEPLGLVEEAAKTAPGKKRPVDQSPQEPDSSSGVGKSGKQPARKRLNFGQTGDSESVPDPQPLGEPPAAPTSLGSNTMASGGGAPMADNNEGADGVGNSSGNWHCDSQWLGDRVITTSTRTWALPTYNNHLYKQISSQSDASNDNHYFGYSTPWGYFDFNRFHCHFSPRDWQRLINNNWGFRPKKLSFKLFNIQVKEVTQNDGTTTIANNLTSTVQVFTDSEYQLPYVLGSAHQGCLPPFPADVFMVPQYGYLTLNNGSQAVGRSSFYCLEYFPSQMLRTGNNFQFSYTFEDVPFHSSYAHSQSLDRLMNPLIDQYLYYLNRTQGTTSGTTNQSRLLFSQAGPQSMSLQARNWLPGPCYRQQRLSKTANDNNNSNFPWTAASKYHLNGRDSLVNPGPAMASHKDDEEKFFPMHGNLIFGKEGTTASNAELDNVMITDEEEIRTTNPVATEQYGTVANNLQSSNTAPTTRTVNDQGALPGMVWQDRDVYLQGPIWAKIPHTDGHFHPSPLMGGFGLKHPPPQIMIKNTPVPANPPTTFSPAKFASFITQYSTGQVSVEIEWELQKENSKRWNPEIQYTSNYNKSVNVDFTVDTNGVYSEPRPIGTRYLTRNL

SEQ ID NO: 47 - DNA, 2208 bp, Artificial Sequence
  Description of Artificial Sequence: Synthetic polynucleotide
atggctgctgacggttatcttccagattggctcgaggacaacctttctgaaggcattcgtgagtggtgggctctgaaacctggagtccctcaacccaaagcgaaccaacaacaccaggacaaccgtcggggtcttgtgcttccgggttacaaatacctcggacccggtaacggactcgacaaaggagagccggtcaacgaggcggacgcggcagccctcgaacacgacaaagcttacgaccagcagctcaaggccggtgacaacccgtacctcaagtacaaccacgccgacgccgagtttcaggagcgtcttcaagaagatacgtcttttgggggcaaccttggcagagcagtcttccaggccaaaaagaggatccttgagcctcttggtctggttgaggaagcagctaaaacggctcctggaaagaagaggcctgtagatcagtctcctcaggaaccggactcatcatctggtgttggcaaatcgggcaaacagcctgccagaaaaagactaaatttcggtcagactggcgactcagagtcagtcccagaccctcaacctctcggagaaccaccagcagcccccacaagtttgggatctaatacaatggcttcaggcggtggcgcaccaatggcagacaataacgagggtgccgatggagtgggtaattcctcaggaaattggcattgcgattcccaatggctgggcgacagagtcatcaccaccagcaccagaacctgggccctgcccacttacaacaaccatctctacaagcaaatctccagccaatcagatgcttcaaacgacaaccactactttggctacagcaccccttgggggtattttgactttaacagattccactgccacttctcaccacgtgactggcagcgactcattaacaacaactggggattccggcccaagaaactcagcttcaagctcttcaacatccaagttaaagaggtcacgcagaacgatggcacgacgactattgccaataaccttaccagcacggttcaagtgtttacggactcggagtatcagctcccgtacgtgctcgggtcggcgcaccaaggctgtctcccgccgtttccagcggacgtcttcatggtccctcagtatggatacctcaccctgaacaacggaagtcaagcggtgggacgctcatccttttactgcctggagtacttcccttcgcagatgctaaggactggaaataacttccaattcagctataccttcgaggatgtaccttttcacagcagctacgctcacagccagagtttggatcgcttgatgaatcctcttattgatcagtatctgtactacctgaacagaacgcaaggaacaacctctggaacaaccaaccaatcacggctgctttttagccaggctgggcctcagtctatgtctttgcaggccagaaattggctacctgggccctgctaccggcaacagagactttcaaaggtagctaacgacaacaacaacagtaactttccttggacagcggccagcaaatatcatctcaatggccgcgactcgctggtgaatccaggaccagctatggccagtcacaaggacgatgaagaaaaatttttccctatgcacggcaatctaatatttggcaaagaagggacaacggcaagtaacgcagaattagataatgtaatgattacggatgaagaagagattcgtaccaccaatcctgtggcaacagagcagtatggaactgtggcaaataacttgcagagctcaaatacagctcccacgactagaactgtcaatgatcagggggccttacctggcatggtgtggcaagatcgtgacgtgtaccttcaaggacctatctgggcaaagattcctcacacggatggacactttcatccttctcctctgatgggaggctttggactgaaacatccgcctcctcaaatcatgatcaaaaatactccggtaccggcaaatcctccgacgactttcgtaccggccaagtttgcttcatttatcactcagtactccactggacaggtcagcgtggaaattgagtgggagctacagaaagaaaacagcaaacgttggaatccagagattcagtacacttccaactacaacaagtctgttaatgtggactttactgtagacactaatggtgtttatagtgaacctcgccctattggaacccggtatctcacacgaaacttg

SEQ ID NO: 48 - protein, 736 aa, Artificial Sequence
  Description of Artificial Sequence: Synthetic polypeptide
MAADGYLPDWLEDNLSEGIREWWALKPGVPQPKANQQHQDNRRGLVLPGYKYLGPGNGLDKGEPVNEADAAALEHDKAYDQQLKAGDNPYLKYNHADAEFQERLQEDTSFGGNLGRAVFQAKKRILEPLGLVEEAAKTAPGKKRPVDQSPQEPDSSSGVGKSGKQPARKRLNFGQTGDSESVPDPQPLGEPPAAPTSLGSNTMASGGGAPMADNNEGADGVGNSSGNWHCDSQWLGDRVITTSTRTWALPTYNNHLYKQISSQSGASNDNHYFGYSTPWGYFDFNRFHCHFSPRDWQRLINNNWGFRPKKLSFKLFNIQVKEVTQNDGTTTIANNLTSTVQVFTDSEYQLPYVLGSAHQGCLPPFPADVFMVPQYGYLTLNNGSQAVGRSSFYCLEYFPSQMLRTGNNFQFSYTFEDVPFHSSYAHSQSLDRLMNPLIDQYLYYLNRTQGTTSGTTNQSRLLFSQAGPQSMSLQARNWLPGPCYRQQRLSKVANDNNNSNFPWTAASKYHLNGRDSLVNPGPAMASHKDDEEKFFPMHGNLIFGKEGTTASNAELDNVMITDEEEIRTTNPVATEQYGTVANNLQSSNTAPTTRTVNDQGALPGMVWQDRDVYLQGPIWAKIPHTDGHFHPSPLMGGFGLKHPPPQIMIKNTPVPANPPTTFVPAKFASFITQYSTGQVSVEIEWELQKENSKRWNPEIQYTSNYNKSVNVDFTVDTNGVYSEPRPIGTRYLTRNL

SEQ ID NO: 49 - DNA, 2134 bp, Artificial Sequence
  Description of Artificial Sequence: Synthetic polynucleotide
gaaacctggagtccctcaacccaaagcgaaccaacaacaccaggacaaccgtcggggtcttgtgcttccgggttacaaatacctcggacccggtaacggactcgacaaaggagagccggtcaacgaggcggacgcggcagccctcgaacacgacaaagcttacgaccagcagctcaaggccggtgacaacccgtacctcaagtacaaccacgccgacgccgagtttcaggagcgtcttcaagaagatacgtcttttgggggcaaccttggcagagcagtcttccaggccaaaaagaggatccttgagcctcttggtctggttgaggaagcagctaaaacggctcctggaaagaagaggcctgtagatcagtctcctcaggaaccggactcatcatctggtgttggcaaatcgggcaaacagcctgccagaaaaagactaaatttcggtcagactggcgactcagagtcagtcccagaccctcaacctctcggagaaccaccagcagcccccacaagtttgggatctaatacaatggcttcaggcggtggcgcaccaatggcagacaataacgagggtgccgatggagtgggtaattcctcaggaaattggcattgcgattcccaatggctgggcgacagagtcatcaccaccagcaccagaacctgggccctgcccacttacaacaaccatctctacaagcaaatctccagccaatcaggagcttcaaacgacaaccactactttggctacagcaccccttgggggtattttgactttaacagattccactgccacttctcaccacgtgactggcagcgactcattaacaacaactggggattccggcccaagaaactcagcttcaagctcttcaacatccaagttaaagaggtcacgcagaacgatggcacgacgactattgccaataaccttaccagcacggttcaagtgtttacggactcggagtatcagctcccgtacgtgctcgggtcggcgcaccaaggctgtctcccgccgtttccagcggacgtcttcatggtccctcagtatggatacctcaccctgaacaacggaagtcaagcggtgggacgctcatccttttactgcctggagtacttcccttcgcagatgctaaggactggaaataacttccaattcagctataccttcgaggatgtaccttttcacagcagctacgctcacagccagagtttggatcgcttgatgaatcctcttattgatcagtatctgtactacctgaacagaacgcaaggaacaacctctggaacaaccaaccaatcacggctgctttttagccaggctgggcctcagtctatgtctttgcaggccagaaattggctacctgggccctgctaccggcaacagagactttcaaagactgctaacgacaacaacaacagtaactttccttggacagcggccagcaaatatcatctcaatggccgcgactcgctggtgaatccaggaccagctatggccagtcacaaggacgatgaagaaaaatttttccctatgcacggcaatctaatatttggcaaagaagggacaacggcaagtaacgcagaattagataatgtaatgattacggatgaagaagagattcgtaccaccaatcctgtggcaacagagcagtatggaactgtggcaaataacttgcagagctcaaatacagctcccacgactagaactgtcaatgatcagggggccttacctggcatggtgtggcaagatcgtgacgtgtaccttcaaggacctatctgggcaaagattcctcacacggatggacactttcatccttctcctctgatgggaggctttggactgaaacatccgcctcctcaaatcatgatcaaaaatactccggtaccggcaaatcctccgacgactttcagcccggccaagtttgcttcatttatcactcagtactccactggacaggtcagcgtggaaattgagtgggagctacagaaagaaaacagcaaacgttggaatccagagattcagtacacttccaactacaacaagtctgttaatgtggactttactgtagacactaatggtgtttatagtgaacctcgccctattggaacccggtatctcacacgaaacttg

SEQ ID NO: 50 - protein, 736 aa, Artificial Sequence
  Description of Artificial Sequence: Synthetic polypeptide
MAADGYLPDWLEDNLSEGIREWWALKPGVPQPKANQQHQDNRRGLVLPGYKYLGPGNGLDKGEPVNEADAAALEHDKAYDQQLKAGDNPYLKYNHADAEFQERLQEDTSFGGNLGRAVFQAKKRILEPLGLVEEAAKTAPGKKRPVDQSPQEPDSSSGVGKSGKQPARKRLNFGQTGDSESVPDPQPLGEPPAAPTSLGSNTMASGGGAPMADNNEGADGVGNSSGNWHCDSQWLGDRVITTSTRTWALPTYNNHLYKQISSQSDASNDNHYFGYSTPWGYFDFNRFHCHFSPRDWQRLINNNWGFRPKKLSFKLFNIQVKEVTQNDGTTTIANNLTSTVQVFTDSEYQLPYVLGSAHQGCLPPFPADVFMVPQYGYLTLNNGSQAVGRSSFYCLEYFPSQMLRTGNNFQFSYTFEDVPFHSSYAHSQSLDRLMNPLIDQYLYYLNRTQGTTSGTTNQSRLLFSQAGPQSMSLQARNWLPGPCYRQQRLSKTANDNNNSNFPWTAASKYHLNGRDSLVNPGPAMASHKDDEEKFFPMHGNLIFGKEGTAASNAELDNVMITDEEEIRTTNPVATEQYGTVANNLQSSNTAPTTRTVNDQGALPGMVWQDRDVYLQGPIWAKIPHTDGHFHPSPLMGGFGLKHPPPQIMIKNTPVPANPPTTFSPAKFASFITQYSTGQVSVEIEWELQKENSKRWNPEIQYTSNYNKSVNVDFTVDTNGVYSEPRPIGTRYLTRNL

SEQ ID NO: 51 - DNA, 2208 bp, Artificial Sequence; identical to SEQ ID NO: 43
  Description of Artificial Sequence: Synthetic polynucleotide

SEQ ID NO: 52 - protein, 736 aa, Artificial Sequence
  Description of Artificial Sequence: Synthetic polypeptide
MAADGYLPDWLEDNLSEGIREWWALKPGVPQPKANQQHQDNRRGLVLPGYKYLGPGNGLDKGEPVNEADAAALEHDKAYDQQLKAGDNPYLKYNHADAEFQERLQEDTSFGGNLGRAVFQAKKRILEPLGLVEEAAKTAPGKKRPVDQSPQEPDSSSGVGKSGKQPARKRLNFGQTGDSESVPDPQPLGEPPAAPTSLGSNTMASGGGAPMADNNEGADGVGNSSGNWHCDSQWLGDRVITTSTRTWALPTYNNHLYKQISSQSGASNDNHYFGYSTPWGYFDFNRFHCHFSPRDWQRLINNNWGFRPKKLSFKLFNIQVKEVTQNDGTTTIANNLTSTVQVFTDSEYQLPYVLGSAHQGCLPPFPADVFMVPQYGYLTLNNGSQAVGRSSFYCLEYFPSQMLRTGNNFQFSYTFEDVPFHSSYAHSQSLDRLMNPLIDQYLYYLNRTQGTTSGTTNQSRLLFSQAGPQSMSLQARNWLPGPCYRQQRLSKTANDNNNSNFPWTAASKYHLNGRDSLVNPGPAMASHKDDEEKFFPMHGNLIFGKEGTAASNAELDNVMITDEEEIRTTNPVATEQYGTVANNLQSSNTAPTTRTVNDQGALPGMVWQDRDVYLQGPIWAKIPHTDGHFHPSPLMGGFGLKHPPPQIMIKNTPVPANPPTTFSPAKFASFITQYSTGQVSVEIEWELQKENSKRWNPEIQYTSNYNKSVNVDFTVDTNGVYSEPRPIGTRYLTRNL

SEQ ID NO: 53 - DNA, 2208 bp, Artificial Sequence; identical to SEQ ID NO: 43
  Description of Artificial Sequence: Synthetic polynucleotide

SEQ ID NO: 54 - protein, 736 aa, Artificial Sequence
  Description of Artificial Sequence: Synthetic polypeptide
MAADGYLPDWLEDNLSEGIREWWALKPGVPQPKANQQHQDNRRGLVLPGYKYLGPGNGLDKGEPVNEADAAALEHDKAYDQQLKAGDNPYLKYNHADAEFQERLQEDTSFGGNLGRAVFQAKKRILEPLGLVEEAAKTAPGKKRPVDQSPQEPDSSSGVGKSGKQPARKRLNFGQTGDSESVPDPQPLGEPPAAPTSLGSNTMASGGGAPMADNNEGADGVGNSSGNWHCDSQWLGDRVITTSTRTWALPTYNNHLYKQISSYSGASNDNHYFGYSTPWGYFDFNRFHCHFSPRDWQRLINNNWGFRPKKLSFKLFNIQVKEVTQNDGTTTIANNLTSTVQVFTDSEYQLPYVLGSAHQGCLPPFPADVFMVPQYGYLTLNNGSQAVGRSSFYCLEYFPSQMLRTGNNFQFSYTFEDVPFHSSYAHSQSLDRLMNPLIDQYLYYLNRTQGTTSGTTNQSRLLFSQAGPQSMSLQARNWLPGPCYRQQRLSKTANDNNNSNFPWTAASKYHLNGRDSLVNPGPAMASHKDDEEKFFPMHGNLIFGKEGTTASNAELDNVMITDEEEIRTTNPVATEQYGTVANNLQSSNTAPTTRTVNDQGALPGMVWQDRDVYLQGPIWAKIPHTDGHFHPSPLMGGFGLKHPPPQIMIKNTPVPANPPTTFSPAKFASFITQYSTGQVSVEIEWELQKENSKRWNPEIQYTSNYNKSVNVDFTVDTNGVYSEPRPIGTRYLTRNL

SEQ ID NO: 55 - DNA, 2859 bp, Homo sapiens
atgggagtgaggcacccgccctgctcccaccggctcctggccgtctgcgccctcgtgtccttggcaaccgctgcactcctggggcacatcctactccatgatttcctgctggttccccgagagctgagtggctcctccccagtcctggaggagactcacccagctcaccagcagggagccagcagaccagggccccgggatgcccaggcacaccccggccgtcccagagcagtgcccacacagtgcgacgtcccccccaacagccgcttcgattgcgcccctgacaaggccatcacccaggaacagtgcgaggcccgcggctgctgctacatccctgcaaagcaggggctgcagggagcccagatggggcagccctggtgcttcttcccacccagctaccccagctacaagctggagaacctgagctcctctgaaatgggctacacggccaccctgacccgtaccacccccaccttcttccccaaggacatcctgaccctgcggctggacgtgatgatggagactgagaaccgcctccacttcacgatcaaagatccagctaacaggcgctacgaggtgcccttggagaccccgcgtgtccacagccgggcaccgtccccactctacagcgtggagttctccgaggagcccttcggggtgatcgtgcaccggcagctggacggccgcgtgctgctgaacacgacggtggcgcccctgttctttgcggaccagttccttcagctgtccacctcgctgccctcgcagtatatcacaggcctcgccgagcacctcagtcccctgatgctcagcaccagctggaccaggatcaccctgtggaaccgggaccttgcgcccacgcccggtgcgaacctctacgggtctcaccctttctacctggcgctggaggacggcgggtcggcacacggggtgttcctgctaaacagcaatgccatggatgtggtcctgcagccgagccctgcccttagctggaggtcgacaggtgggatcctggatgtctacatcttcctgggcccagagcccaagagcgtggtgcagcagtacctggacgttgtgggatacccgttcatgccgccatactggggcctgggcttccacctgtgccgctggggctactcctccaccgctatcacccgccaggtggtggagaacatgaccagggcccacttccccctggacgtccaatggaacgacctggactacatggactcccggagggacttcacgttcaacaaggatggcttccgggacttcccggccatggtgcaggagctgcaccagggcggccggcgctacatgatgatcgtggatcctgccatcagcagctcgggccctgccgggagctacaggccctacgacgagggtctgcggaggggggttttcatcaccaacgagaccggccagccgctgattgggaaggtatggcccgggtccactgccttccccgacttcaccaaccccacagccctggcctggtgggaggacatggtggctgagttccatgaccaggtgcccttcgacggcatgtggattgacatgaacgagccttccaacttcatcagaggctctgaggacggctgccccaacaatgagctggagaacccaccctacgtgcctggggtggttggggggaccctccaggcggccaccatctgtgcctccagccaccagtttctctccacacactacaacctgcacaacctctacggcctgaccgaagccatcgcctcccacagggcgctggtgaaggctcgggggacacgcccatttgtgatctcccgctcgacctttgctggccacggccgatacgccggccactggacgggggacgtgtggagctcctgggagcagctcgcctcctccgtgccagaaatcctgcagtttaacctgctgggggtgcctctggtcggggccgacgtctgcggcttcctgggcaacacctcagaggagctgtgtgtgcgctggacccagctgggggccttctaccccttcatgcggaaccacaacagcctgctcagtctgccccaggagccgtacagcttcagcgagccggcccagcaggccatgaggaaggccctcaccctgcgctacgcactcctcccccacctctacacactgttccaccaggcccacgtcgcgggggagaccgtggcccggcccctcttcctggagttccccaaggactctagcacctggactgtggaccaccagctcctgtggggggaggccctgctcatcaccccagtgctccaggccgggaaggccgaagtgactggctacttccccttgggcacatggtacgacctgcagacggtgccaatagaggcccttggcagcctcccacccccacctgcagctccccgtgagccagccatccacagcgaggggcagtgggtgacgctgccggcccccctggacaccatcaacgtccacctccgggctgggtacatcatccccctgcagggccctggcctcacaaccacagagtcccgccagcagcccatggccctggctgtggccctgaccaagggtggagaggcccgaggggagctgttctgggacgatggagagagcctggaagtgctggagcgaggggcctacacacaggtcatcttcctggccaggaataacacgatcgtgaatgagctggtacgtgtgaccagtgagggagctggcctgcagctgcagaaggtgactgtcctgggcgtggccacggcgccccagcaggtcctctccaacggtgtccctgtctccaacttcacctacagccccgacaccaaggtcctggacatctgtgtctcgctgttgatgggagagcagtttctcgtcagctggtgttag

SEQ ID NO: 56 - DNA, 2652 bp, Homo sapiens
gcacaccccggccgtcccagagcagtgcccacacagtgcgacgtcccccccaacagccgcttcgattgcgcccctgacaaggccatcacccaggaacagtgcgaggcccgcggctgctgctacatccctgcaaagcaggggctgcagggagcccagatggggcagccctggtgcttcttcccacccagctaccccagctacaagctggagaacctgagctcctctgaaatgggctacacggccaccctgacccgtaccacccccaccttcttccccaaggacatcctgaccctgcggctggacgtgatgatggagactgagaaccgcctccacttcacgatcaaagatccagctaacaggcgctacgaggtgcccttggagaccccgcgtgtccacagccgggcaccgtccccactctacagcgtggagttctccgaggagcccttcggggtgatcgtgcaccggcagctggacggccgcgtgctgctgaacacgacggtggcgcccctgttctttgcggaccagttccttcagctgtccacctcgctgccctcgcagtatatcacaggcctcgccgagcacctcagtcccctgatgctcagcaccagctggaccaggatcaccctgtggaaccgggaccttgcgcccacgcccggtgcgaacctctacgggtctcaccctttctacctggcgctggaggacggcgggtcggcacacggggtgttcctgctaaacagcaatgccatggatgtggtcctgcagccgagccctgcccttagctggaggtcgacaggtgggatcctggatgtctacatcttcctgggcccagagcccaagagcgtggtgcagcagtacctggacgttgtgggatacccgttcatgccgccatactggggcctgggcttccacctgtgccgctggggctactcctccaccgctatcacccgccaggtggtggagaacatgaccagggcccacttccccctggacgtccaatggaacgacctggactacatggactcccggagggacttcacgttcaacaaggatggcttccgggacttcccggccatggtgcaggagctgcaccagggcggccggcgctacatgatgatcgtggatcctgccatcagcagctcgggccctgccgggagctacaggccctacgacgagggtctgcggaggggggttttcatcaccaacgagaccggccagccgctgattgggaaggtatggcccgggtccactgccttccccgacttcaccaaccccacagccctggcctggtgggaggacatggtggctgagttccatgaccaggtgcccttcgacggcatgtggattgacatgaacgagccttccaacttcatcagaggctctgaggacggctgccccaacaatgagctggagaacccaccctacgtgcctggggtggttggggggaccctccaggcggccaccatctgtgcctccagccaccagtttctctccacacactacaacctgcacaacctctacggcctgaccgaagccatcgcctcccacagggcgctggtgaaggctcgggggacacgcccatttgtgatctcccgctcgacctttgctggccacggccgatacgccggccactggacgggggacgtgtggagctcctgggagcagctcgcctcctccgtgccagaaatcctgcagtttaacctgctgggggtgcctctggtcggggccgacgtctgcggcttcctgggcaacacctcagaggagctgtgtgtgcgctggacccagctgggggccttctaccccttcatgcggaaccacaacagcctgctcagtctgccccaggagccgtacagcttcagcgagccggcccagcaggccatgaggaaggccctcaccctgcgctacgcactcctcccccacctctacacactgttccaccaggcccacgtcgcgggggagaccgtggcccggcccctcttcctggagttccccaaggactctagcacctggactgtggaccaccagctcctgtggggggaggccctgctcatcaccccagtgctccaggccgggaaggccgaagtgactggctacttccccttgggcacatggtacgacctgcagacggtgccaatagaggcccttggcagcctcccacccccacctgcagctccccgtgagccagccatccacagcgaggggcagtgggtgacgctgccggcccccctggacaccatcaacgtccacctccgggctgggtacatcatccccctgcagggccctggcctcacaaccacagagtcccgccagcagcccatggccctggctgtggccctgaccaagggtggagaggcccgaggggagctgttctgggacgatggagagagcctggaagtgctggagcgaggggcctacacacaggtcatcttcctggccaggaataacacgatcgtgaatgagctggtacgtgtgaccagtgagggagctggcctgcagctgcagaaggtgactgtcctgggcgtggccacggcgccccagcaggtcctctccaacggtgtccctgtctccaacttcacctacagccccgacaccaaggtcctggacatctgtgtctcgctgttgatgggagagcagtttctcgtcagctggtgttag

SEQ ID NO: 57 - DNA, 4573 bp, Artificial Sequence
  Description of Artificial Sequence: Synthetic polynucleotide
ttggccactccctctctgcgcgctcgctcgctcactgaggccgggcgaccaaaggtcgcccgacgcccgggctttgcccgggcggcctcagtgagcgagcgagcgcgcagagagggagtggccaactccatcactaggggttcctgagtttaaacttcgtcgacgattcgagcttgggctgcaggtcgagggcactgggaggatgttgagtaagatggaaaactactgatgacccttgcagagacagagtattaggacatgtttgaacaggggccgggcgatcagcaggtagctctagaggatccccgtctgtctgcacatttcgtagagcgagtgttccgatactctaatctccctaggcaaggttcatatttgtgtaggttacttattctccttttgttgactaagtcaataatcagaatcagcaggtttggagtcagcttggcagggatcagcagcctgggttggaaggagggggtataaaagccccttcaccaggagaagccgtcacacagactagccctaaggtaagttggcgccgtttaagggatggttggttggtggggtattaatgtttaattaccttttttacaggcctgaactaggcgcgccaccgccaccatgccgtcttctgtctcgtggggcatcctcctgctggcaggcctgtgctgcctggtccctgtctccctggctgcttaccgccccagtgagaccctgtgcggcggggagctggtggacaccctccagttcgtctgtggggaccgcggcttctacttcagcaggcccgcaagccgtgtgagccgtcgcagccgtggcatcatggaggagtgctgtttccgcagctgtgacctggccctcctggagacgtactgtgctacccccgccaagtccgagggcgcgccggcacaccccggccgtcccagagcagtgcccacacagtgcgacgtcccccccaacagccgcttcgattgcgcccctgacaaggccatcacccaggaacagtgcgaggcccgcggctgctgctacatccctgcaaagcaggggctgcagggagcccagatggggcagccctggtgcttcttcccacccagctaccccagctacaagctggagaacctgagctcctctgaaatgggctacacggccaccctgacccgtaccacccccaccttcttccccaaggacatcctgaccctgcggctggacgtgatgatggagactgagaaccgcctccacttcacgatcaaagatccagctaacaggcgctacgaggtgcccttggagaccccgcgtgtccacagccgggcaccgtccccactctacagcgtggagttctccgaggagcccttcggggtgatcgtgcaccggcagctggacggccgcgtgctgctgaacacgacggtggcgcccctgttctttgcggaccagttccttcagctgtccacctcgctgccctcgcagtatatcacaggcctcgccgagcacctcagtcccctgatgctcagcaccagctggaccaggatcaccctgtggaaccgggaccttgcgcccacgcccggtgcgaacctctacgggtctcaccctttctacctggcgctggaggacggcgggtcggcacacggggtgttcctgctaaacagcaatgccatggatgtggtcctgcagccgagccctgcccttagctggaggtcgacaggtgggatcctggatgtctacatcttcctgggcccagagcccaagagcgtggtgcagcagtacctggacgttgtgggatacccgttcatgccgccatactggggcctgggcttccacctgtgccgctggggctactcctccaccgctatcacccgccaggtggtggagaacatgaccagggcccacttccccctggacgtccaatggaacgacctggactacatggactcccggagggacttcacgttcaacaaggatggcttccgggacttcccggccatggtgcaggagctgcaccagggcggccggcgctacatgatgatcgtggatcctgccatcagcagctcgggccctgccgggagctacaggccctacgacgagggtctgcggaggggggttttcatcaccaacgagaccggccagccgctgattgggaaggtatggcccgggtccactgccttccccgacttcaccaaccccacagccctggcctggtgggaggacatggtggctgagttccatgaccaggtgcccttcgacggcatgtggattgacatgaacgagccttccaacttcatcagaggctctgaggacggctgccccaacaatgagctggagaacccaccctacgtgcctggggtggttggggggaccctccaggcggccaccatctgtgcctccagccaccagtttctctccacacactacaacctgcacaacctctacggcctgaccgaagccatcgcctcccacagggcgctggtgaaggctcgggggacacgcccatttgtgatctcccgctcgacctttgctggccacggccgatacgccggccactggacgggggacgtgtggagctcctgggagcagctcgcctcctccgtgccagaaatcctgcagtttaacctgctgggggtgcctctggtcggggccgacgtctgcggcttcctgggcaacacctcagaggagctgtgtgtgcgctggacccagctgggggccttctaccccttcatgcggaaccacaacagcctgctcagtctgccccaggagccgtacagcttcagcgagccggcccagcaggccatgaggaaggccctcaccctgcgctacgcactcctcccccacctctacacactgttccaccaggcccacgtcgcgggggagaccgtggcccggcccctcttcctggagttccccaaggactctagcacctggactgtggaccaccagctcctgtggggggaggccctgctcatcaccccagtgctccaggccgggaaggccgaagtgactggctacttccccttgggcacatggtacgacctgcagacggtgccaatagaggcccttggcagcctcccacccccacctgcagctccccgtgagccagccatccacagcgaggggcagtgggtgacgctgccggcccccctggacaccatcaacgtccacctccgggctgggtacatcatccccctgcagggccctggcctcacaaccacagagtcccgccagcagcccatggccctggctgtggccctgaccaagggtggagaggcccgaggggagctgttctgggacgatggagagagcctggaagtgctggagcgaggggcctacacacaggtcatcttcctggccaggaataacacgatcgtgaatgagctggtacgtgtgaccagtgagggagctggcctgcagctgcagaaggtgactgtcctgggcgtggccacggcgccccagcaggtcctctccaacggtgtccctgtctccaacttcacctacagccccgacaccaaggtcctggacatctgtgtctcgctgttgatgggagagcagtttctcgtcagctggtgttagcgagcggccgctcttagtagcagtatcgatcccagcccacttttccccaatacgactacgagatctgtggcttctagctgcccgggtggcatccctgtgacccctccccagtgcctctcctggccctggaagttgccactccagtgcccaccagccttgtcctaataaaattaagttgcatcattttgtctgactaggtgtccttctataatattatggggtggaggggggtggtatggagcaaggggcaagttgggaaggccgacccgcgaatagtagatcccgcgagggcttgaatctatcacctagagtacaccctagagaatagctagctctcaatgactaaggactaaacttggtatttcgactgaagcctgtcccctcactgttggcgctaggaggagagttcgtagaaaggatagtacgatttaagtatctctaagccttgtgaagcactaaggttgcgtacagacgtgcttgaattacggataattcgggaaccttgggacacacaaaaaaccaacacacagatctaatgaaaataaagatcttttatttaggcgcctctgacttcctggggattgacctgagttctactctagcgtttgctggttcggtgaactaatctgtgagatccccaactctccgtttgggatctccactctctggtgtcctaaccttggtgccccactgtctactgctagtgagaccttacgcgctgagaaacgtggcgttactctaactaagcgacgcgcacttgcactctgaatacttctaccgtaactaaccccggacctcagaactcagacggatctacgctgtccatcaacaccagacttagattacctctgttaagtttaattaagctcgcgaaggaacccctagtgatggagttggccactccctctctgcgcgctcgctcgctcactgaggccgggcgaccaaaggtcgcccgacgcccgggctttgcccgggcggcctcagtgagcgagcgagcgcgcagagagggagtggccaa

SEQ ID NO: 58 - DNA, 4597 bp, Artificial Sequence
  Description of Artificial Sequence: Synthetic polynucleotide
ttggccactccctctctgcgcgctcgctcgctcactgaggccgggcgaccaaaggtcgcccgacgcccgggctttgcccgggcggcctcagtgagcgagcgagcgcgcagagagggagtggccaactccatcactaggggttcctgagtttaaacttcgtcgacgattcgagcttgggctgcaggtcgagggcactgggaggatgttgagtaagatggaaaactactgatgacccttgcagagacagagtattaggacatgtttgaacaggggccgggcgatcagcaggtagctctagaggatccccgtctgtctgcacatttcgtagagcgagtgttccgatactctaatctccctaggcaaggttcatatttgtgtaggttacttattctccttttgttgactaagtcaataatcagaatcagcaggtttggagtcagcttggcagggatcagcagcctgggttggaaggagggggtataaaagccccttcaccaggagaagccgtcacacagactagccctaaggtaagttggcgccgtttaagggatggttggttggtggggtattaatgtttaattaccttttttacaggcctgaactaggcgcgccaccgccaccatgctcaggggtccgggacccgggcggctgctgctgctagcagtcctgtgcctggggacatcggtgcgctgcaccgaaaccgggaagagcaagagggcttaccgccccagtgagaccctgtgcggcggggagctggtggacaccctccagttcgtctgtggggaccgcggcttctacttcagcaggcccgcaagccgtgtgagccgtcgcagccgtggcatcatggaggagtgctgtttccgcagctgtgacctggccctcctggagacgtactgtgctacccccgccaagtccgagggcgcgccggcacaccccggccgtcccagagcagtgcccacacagtgcgacgtcccccccaacagccgcttcgattgcgcccctgacaaggccatcacccaggaacagtgcgaggcccgcggctgctgctacatccctgcaaagcaggggctgcagggagcccagatggggcagccctggtgcttcttcccacccagctaccccagctacaagctggagaacctgagctcctctgaaatgggctacacggccaccctgacccgtaccacccccaccttcttccccaaggacatcctgaccctgcggctggacgtgatgatggagactgagaaccgcctccacttcacgatcaaagatccagctaacaggcgctacgaggtgcccttggagaccccgcgtgtccacagccgggcaccgtccccactctacagcgtggagttctccgaggagcccttcggggtgatcgtgcaccggcagctggacggccgcgtgctgctgaacacgacggtggcgcccctgttctttgcggaccagttccttcagctgtccacctcgctgccctcgcagtatatcacaggcctcgccgagcacctcagtcccctgatgctcagcaccagctggaccaggatcaccctgtggaaccgggaccttgcgcccacgcccggtgcgaacctctacgggtctcaccctttctacctggcgctggaggacggcgggtcggcacacggggtgttcctgctaaacagcaatgccatggatgtggtcctgcagccgagccctgcccttagctggaggtcgacaggtgggatcctggatgtctacatcttcctgggcccagagcccaagagcgtggtgcagcagtacctggacgttgtgggatacccgttcatgccgccatactggggcctgggcttccacctgtgccgctggggctactcctccaccgctatcacccgccaggtggtggagaacatgaccagggcccacttccccctggacgtccaatggaacgacctggactacatggactcccggagggacttcacgttcaacaaggatggcttccgggacttcccggccatggtgcaggagctgcaccagggcggccggcgctacatgatgatcgtggatcctgccatcagcagctcgggccctgccgggagctacaggccctacgacgagggtctgcggaggggggttttcatcaccaacgagaccggccagccgctgattgggaaggtatggcccgggtccactgccttccccgacttcaccaaccccacagccctggcctggtgggaggacatggtggctgagttccatgaccaggtgcccttcgacggcatgtggattgacatgaacgagccttccaacttcatcagaggctctgaggacggctgccccaacaatgagctggagaacccaccctacgtgcctggggtggttggggggaccctccaggcggccaccatctgtgcctccagccaccagtttctctccacacactacaacctgcacaacctctacggcctgaccgaagccatcgcctcccacagggcgctggtgaaggctcgggggacacgcccatttgtgatctcccgctcgacctttgctggccacggccgatacgccggccactggacgggggacgtgtggagctcctgggagcagctcgcctcctccgtgccagaaatcctgcagtttaacctgctgggggtgcctctggtcggggccgacgtctgcggcttcctgggcaacacctcagaggagctgtgtgtgcgctggacccagctgggggccttctaccccttcatgcggaaccacaacagcctgctcagtctgccccaggagccgtacagcttcagcgagccggcccagcaggccatgaggaaggccctcaccctgcgctacgcactcctcccccacctctacacactgttccaccaggcccacgtcgcgggggagaccgtggcccggcccctcttcctggagttccccaaggactctagcacctggactgtggaccaccagctcctgtggggggaggccctgctcatcaccccagtgctccaggccgggaaggccgaagtgactggctacttccccttgggcacatggtacgacctgcagacggtgccaatagaggcccttggcagcctcccacccccacctgcagctccccgtgagccagccatccacagcgaggggcagtgggtgacgctgccggcccccctggacaccatcaacgtccacctccgggctgggtacatcatccccctgcagggccctggcctcacaaccacagagtcccgccagcagcccatggccctggctgtggccctgaccaagggtggagaggcccgaggggagctgttctgggacgatggagagagcctggaagtgctggagcgaggggcctacacacaggtcatcttcctggccaggaataacacgatcgtgaatgagctggtacgtgtgaccagtgagggagctggcctgcagctgcagaaggtgactgtcctgggcgtggccacggcgccccagcaggtcctctccaacggtgtccctgtctccaacttcacctacagccccgacaccaaggtcctggacatctgtgtctcgctgttgatgggagagcagtttctcgtcagctggtgttagcgagcggccgctcttagtagcagtatcgatcccagcccacttttccccaatacgactacgagatctgtggcttctagctgcccgggtggcatccctgtgacccctccccagtgcctctcctggccctggaagttgccactccagtgcccaccagccttgtcctaataaaattaagttgcatcattttgtctgactaggtgtccttctataatattatggggtggaggggggtggtatggagcaaggggcaagttgggaaggccgacccgcgaatagtagatcccgcgagggcttgaatctatcacctagagtacaccctagagaatagctagctctcaatgactaaggactaaacttggtatttcgactgaagcctgtcccctcactgttggcgctaggaggagagttcgtagaaaggatagtacgatttaagtatctctaagccttgtgaagcactaaggttgcgtacagacgtgcttgaattacggataattcgggaaccttgggacacacaaaaaaccaacacacagatctaatgaaaataaagatcttttatttaggcgcctctgacttcctggggattgacctgagttctactctagcgtttgctggttcggtgaactaatctgtgagatccccaactctccgtttgggatctccactctctggtgtcctaaccttggtgccccactgtctactgctagtgagaccttacgcgctgagaaacgtggcgttactctaactaagcgacgcgcacttgcactctgaatacttctaccgtaactaaccccggacctcagaactcagacggatctacgctgtccatcaacaccagacttagattacctctgttaagtttaattaagctcgcgaaggaacccctagtgatggagttggccactccctctctgcgcgctcgctcgctcactgaggccgggcgaccaaaggtcgcccgacgcccgggctttgcccgggcggcctcagtgagcgagcgagcgcgcagagagggagtggccaa

SEQ ID NO: 59 - DNA, 4594 bp, Artificial Sequence
  Description of Artificial Sequence: Synthetic polynucleotide
ttggccactccctctctgcgcgctcgctcgctcactgaggccgggcgaccaaaggtcgcccgacgcccgggctttgcccgggcggcctcagtgagcgagcgagcgcgcagagagggagtggccaactccatcactaggggttcctgagtttaaacttcgtcgacgattcgagcttgggctgcaggtcgagggcactgggaggatgttgagtaagatggaaaactactgatgacccttgcagagacagagtattaggacatgtttgaacaggggccgggcgatcagcaggtagctctagaggatccccgtctgtctgcacatttcgtagagcgagtgttccgatactctaatctccctaggcaaggttcatatttgtgtaggttacttattctccttttgttgactaagtcaataatcagaatcagcaggtttggagtcagcttggcagggatcagcagcctgggttggaaggagggggtataaaagccccttcaccaggagaagccgtcacacagactagccctaaggtaagttggcgccgtttaagggatggttggttggtggggtattaatgtttaattaccttttttacaggcctgaactaggcgcgccaccgccaccatgcttaggggtccggggcccgggctgctgctgctggccgtccagtgcctggggacagcggtgccctccacgggagcctcgaagagcaagagggcttaccgccccagtgagaccctgtgcggcggggagctggtggacaccctccagttcgtctgtggggaccgcggcttctacttcagcaggcccgcaagccgtgtgagccgtcgcagccgtggcatcatggaggagtgctgtttccgcagctgtgacctggccctcctggagacgtactgtgctacccccgccaagtccgagggcgcgccggcacaccccggccgtcccagagcagtgcccacacagtgcgacgtcccccccaacagccgcttcgattgcgcccctgacaaggccatcacccaggaacagtgcgaggcccgcggctgctgctacatccctgcaaagcaggggctgcagggagcccagatggggcagccctggtgcttcttcccacccagctaccccagctacaagctggagaacctgagctcctctgaaatgggctacacggccaccctgacccgtaccacccccaccttcttccccaaggacatcctgaccctgcggctggacgtgatgatggagactgagaaccgcctccacttcacgatcaaagatccagctaacaggcgctacgaggtgcccttggagaccccgcgtgtccacagccgggcaccgtccccactctacagcgtggagttctccgaggagcccttcggggtgatcgtgcaccggcagctggacggccgcgtgctgctgaacacgacggtggcgcccctgttctttgcggaccagttccttcagctgtccacctcgctgccctcgcagtatatcacaggcctcgccgagcacctcagtcccctgatgctcagcaccagctggaccaggatcaccctgtggaaccgggaccttgcgcccacgcccggtgcgaacctctacgggtctcaccctttctacctggcgctggaggacggcgggtcggcacacggggtgttcctgctaaacagcaatgccatggatgtggtcctgcagccgagccctgcccttagctggaggtcgacaggtgggatcctggatgtctacatcttcctgggcccagagcccaagagcgtggtgcagcagtacctggacgttgtgggatacccgttcatgccgccatactggggcctgggcttccacctgtgccgctggggctactcctccaccgctatcacccgccaggtggtggagaacatgaccagggcccacttccccctggacgtccaatggaacgacctggactacatggactcccggagggacttcacgttcaacaaggatggcttccgggacttcccggccatggtgcaggagctgcaccagggcggccggcgctacatgatgatcgtggatcctgccatcagcagctcgggccctgccgggagctacaggccctacgacgagggtctgcggaggggggttttcatcaccaacgagaccggccagccgctgattgggaaggtatggcccgggtccactgccttccccgacttcaccaaccccacagccctggcctggtgggaggacatggtggctgagttccatgaccaggtgcccttcgacggcatgtggattgacatgaacgagccttccaacttcatcagaggctctgaggacggctgccccaacaatgagctggagaacccaccctacgtgcctggggtggttggggggaccctccaggcggccaccatctgtgcctccagccaccagtttctctccacacactacaacctgcacaacctctacggcctgaccgaagccatcgcctcccacagggcgctggtgaaggctcgggggacacgcccatttgtgatctcccgctcgacctttgctggccacggccgatacgccggccactggacgggggacgtgtggagctcctgggagcagctcgcctcctccgtgccagaaatcctgcagtttaacctgctgggggtgcctctggtcggggccgacgtctgcggcttcctgggcaacacctcagaggagctgtgtgtgcgctggacccagctgggggccttctaccccttcatgcggaaccacaacagcctgctcagtctgccccaggagccgtacagcttcagcgagccggcccagcaggccatgaggaaggccctcaccctgcgctacgcactcctcccccacctctacacactgttccaccaggcccacgtcgcgggggagaccgtggcccggcccctcttcctggagttccccaaggactctagcacctggactgtggaccaccagctcctgtggggggaggccctgctcatcaccccagtgctccaggccgggaaggccgaagtgactggctacttccccttgggcacatggtacgacctgcagacggtgccaatagaggcccttggcagcctcccacccccacctgcagctccccgtgagccagccatccacagcgaggggcagtgggtgacgctgccggcccccctggacaccatcaacgtccacctccgggctgggtacatcatccccctgcagggccctggcctcacaaccacagagtcccgccagcagcccatggccctggctgtggccctgaccaagggtggagaggcccgaggggagctgttctgggacgatggagagagcctggaagtgctggagcgaggggcctacacacaggtcatcttcctggccaggaataacacgatcgtgaatgagctggtacgtgtgaccagtgagggagctggcctgcagctgcagaaggtgactgtcctgggcgtggccacggcgccccagcaggtcctctccaacggtgtccctgtctccaacttcacctacagccccgacaccaaggtcctggacatctgtgtctcgctgttgatgggagagcagtttctcgtcagctggtgttagcgagcggccgctcttagtagcagtatcgatcccagcccacttttccccaatacgactacgagatctgtggcttctagctgcccgggtggcatccctgtgacccctccccagtgcctctcctggccctggaagttgccactccagtgcccaccagccttgtcctaataaaattaagttgcatcattttgtctgactaggtgtccttctataatattatggggtggaggggggtggtatggagcaaggggcaagttgggaaggccgacccgcgaatagtagatcccgcgagggcttgaatctatcacctagagtacaccctagagaatagctagctctcaatgactaaggactaaacttggtatttcgactgaagcctgtcccctcactgttggcgctaggaggagagttcgtagaaaggatagtacgatttaagtatctctaagccttgtgaagcactaaggttgcgtacagacgtgcttgaattacggataattcgggaaccttgggacacacaaaaaaccaacacacagatctaatgaaaataaagatcttttatttaggcgcctctgacttcctggggattgacctgagttctactctagcgtttgctggttcggtgaactaatctgtgagatccccaactctccgtttgggatctccactctctggtgtcctaaccttggtgccccactgtctactgctagtgagaccttacgcgctgagaaacgtggcgttactctaactaagcgacgcgcacttgcactctgaatacttctaccgtaactaaccccggacctcagaactcagacggatctacgctgtccatcaacaccagacttagattacctctgttaagtttaattaagctcgcgaaggaacccctagtgatggagttggccactccctctctgcgcgctcgctcgctcactgaggccgggcgaccaaaggtcgcccgacgcccgggctttgcccgggcggcctcagtgagcgagcgagcgcgcagagagggagtggccaa

SEQ ID NO: 60 - DNA, 4555 bp, Artificial Sequence
  Description of Artificial Sequence: Synthetic polynucleotide
ttggccactccctctctgcgcgctcgctcgctcactgaggccgggcgaccaaaggtcgcccgacgcccgggctttgcccgggcggcctcagtgagcgagcgagcgcgcagagagggagtggccaactccatcactaggggttcctgagtttaaacttcgtcgacgattcgagcttgggctgcaggtcgagggcactgggaggatgttgagtaagatggaaaactactgatgacccttgcagagacagagtattaggacatgtttgaacaggggccgggcgatcagcaggtagctctagaggatccccgtctgtctgcacatttcgtagagcgagtgttccgatactctaatctccctaggcaaggttcatatttgtgtaggttacttattctccttttgttgactaagtcaataatcagaatcagcaggtttggagtcagcttggcagggatcagcagcctgggttggaaggagggggtataaaagccccttcaccaggagaagccgtcacacagactagccctaaggtaagttggcgccgtttaagggatggttggttggtggggtattaatgtttaattaccttttttacaggcctgaactaggcgcgccaccgccaccatgccgtcttctgtctcgtggggcatcctcctgctggcaggcctgtgctgcctggtccctgtctccctggctgctctgtgcggcggggagctggtggacaccctccagttcgtctgtggggaccgcggcttctacttcagcaggcccgcaagccgtgtgagccgtcgcagccgtggcatcgttgaggagtgctgtttccgcagctgtgacctggccctcctggagacgtactgtgctacccccgccaagtccgagggcgcgccggcacaccccggccgtcccagagcagtgcccacacagtgcgacgtcccccccaacagccgcttcgattgcgcccctgacaaggccatcacccaggaacagtgcgaggcccgcggctgctgctacatccctgcaaagcaggggctgcagggagcccagatggggcagccctggtgcttcttcccacccagctaccccagctacaagctggagaacctgagctcctctgaaatgggctacacggccaccctgacccgtaccacccccaccttcttccccaaggacatcctgaccctgcggctggacgtgatgatggagactgagaaccgcctccacttcacgatcaaagatccagctaacaggcgctacgaggtgcccttggagaccccgcgtgtccacagccgggcaccgtccccactctacagcgtggagttctccgaggagcccttcggggtgatcgtgcaccggcagctggacggccgcgtgctgctgaacacgacggtggcgcccctgttctttgcggaccagttccttcagctgtccacctcgctgccctcgcagtatatcacaggcctcgccgagcacctcagtcccctgatgctcagcaccagctggaccaggatcaccctgtggaaccgggaccttgcgcccacgcccggtgcgaacctctacgggtctcaccctttctacctggcgctggaggacggcgggtcggcacacggggtgttcctgctaaacagcaatgccatggatgtggtcctgcagccgagccctgcccttagctggaggtcgacaggtgggatcctggatgtctacatcttcctgggcccagagcccaagagcgtggtgcagcagtacctggacgttgtgggatacccgttcatgccgccatactggggcctgggcttccacctgtgccgctggggctactcctccaccgctatcacccgccaggtggtggagaacatgaccagggcccacttccccctggacgtccaatggaacgacctggactacatggactcccggagggacttcacgttcaacaaggatggcttccgggacttcccggccatggtgcaggagctgcaccagggcggccggcgctacatgatgatcgtggatcctgccatcagcagctcgggccctgccgggagctacaggccctacgacgagggtctgcggaggggggttttcatcaccaacgagaccggccagccgctgattgggaaggtatggcccgggtccactgccttccccgacttcaccaaccccacagccctggcctggtgggaggacatggtggctgagttccatgaccaggtgcccttcgacggcatgtggattgacatgaacgagccttccaacttcatcagaggctctgaggacggctgccccaacaatgagctggagaacccaccctacgtgcctggggtggttggggggaccctccaggcggccaccatctgtgcctccagccaccagtttctctccacacactacaacctgcacaacctctacggcctgaccgaagccatcgcctcccacagggcgctggtgaaggctcgggggacacgcccatttgtgatctcccgctcgacctttgctggccacggccgatacgccggccactggacgggggacgtgtggagctcctgggagcagctcgcctcctccgtgccagaaatcctgcagtttaacctgctgggggtgcctctggtcggggccgacgtctgcggcttcctgggcaacacctcagaggagctgtgtgtgcgctggacccagctgggggccttctaccccttcatgcggaaccacaacagcctgctcagtctgccccaggagccgtacagcttcagcgagccggcccagcaggccatgaggaaggccctcaccctgcgctacgcactcctcccccacctctacacactgttccaccaggcccacgtcgcgggggagaccgtggcccggcccctcttcctggagttccccaaggactctagcacctggactgtggaccaccagctcctgtggggggaggccctgctcatcaccccagtgctccaggccgggaaggccgaagtgactggctacttccccttgggcacatggtacgacctgcagacggtgccaatagaggcccttggcagcctcccacccccacctgcagctccccgtgagccagccatccacagcgaggggcagtgggtgacgctgccggcccccctggacaccatcaacgtccacctccgggctgggtacatcatccccctgcagggccctggcctcacaaccacagagtcccgccagcagcccatggccctggctgtggccctgaccaagggtggagaggcccgaggggagctgttctgggacgatggagagagcctggaagtgctggagcgaggggcctacacacaggtcatcttcctggccaggaataacacgatcgtgaatgagctggtacgtgtgaccagtgagggagctggcctgcagctgcagaaggtgactgtcctgggcgtggccacggcgccccagcaggtcctctccaacggtgtccctgtctccaacttcacctacagccccgacaccaaggtcctggacatctgtgtctcgctgttgatgggagagcagtttctcgtcagctggtgttagcgagcggccgctcttagtagcagtatcgatcccagcccacttttccccaatacgactacgagatctgtggcttctagctgcccgggtggcatccctgtgacccctccccagtgcctctcctggccctggaagttgccactccagtgcccaccagccttgtcctaataaaattaagttgcatcattttgtctgactaggtgtccttctataatattatggggtggaggggggtggtatggagcaaggggcaagttgggaaggccgacccgcgaatagtagatcccgcgagggcttgaatctatcacctagagtacaccctagagaatagctagctctcaatgactaaggactaaacttggtatttcgactgaagcctgtcccctcactgttggcgctaggaggagagttcgtagaaaggatagtacgatttaagtatctctaagccttgtgaagcactaaggttgcgtacagacgtgcttgaattacggataattcgggaaccttgggacacacaaaaaaccaacacacagatctaatgaaaataaagatcttttatttaggcgcctctgacttcctggggattgacctgagttctactctagcgtttgctggttcggtgaactaatctgtgagatccccaactctccgtttgggatctccactctctggtgtcctaaccttggtgccccactgtctactgctagtgagaccttacgcgctgagaaacgtggcgttactctaactaagcgacgcgcacttgcactctgaatacttctaccgtaactaaccccggacctcagaactcagacggatctacgctgtccatcaacaccagacttagattacctctgttaagtttaattaagctcgcgaaggaacccctagtgatggagttggccactccctctctgcgcgctcgctcgctcactgaggccgggcgaccaaaggtcgcccgacgcccgggctttgcccgggcggcctcagtgagcgagcgagcgcgcagagagggagtggccaa

SEQ ID NO: 61 - DNA, 4579 bp, Artificial Sequence
  Description of Artificial Sequence: Synthetic polynucleotide
ttggccactccctctctgcgcgctcgctcgctcactgaggccgggcgaccaaaggtcgcccgacgcccgggctttgcccgggcggcctcagtgagcgagcgagcgcgcagagagggagtggccaactccatcactaggggttcctgagtttaaacttcgtcgacgattcgagcttgggctgcaggtcgagggcactgggaggatgttgagtaagatggaaaactactgatgacccttgcagagacagagtattaggacatgtttgaacaggggccgggcgatcagcaggtagctctagaggatccccgtctgtctgcacatttcgtagagcgagtgttccgatactctaatctccctaggcaaggttcatatttgtgtaggttacttattctccttttgttgactaagtcaataatcagaatcagcaggtttggagtcagcttggcagggatcagcagcctgggttggaaggagggggtataaaagccccttcaccaggagaagccgtcacacagactagccctaaggtaagttggcgccgtttaagggatggttggttggtggggtattaatgtttaattaccttttttacaggcctgaactaggcgcgccaccgccaccatgctcaggggtccgggacccgggcggctgctgctgctagcagtcctgtgcctggggacatcggtgcgctgcaccgaaaccgggaagagcaagagggctctgtgcggcggggagctggtggacaccctccagttcgtctgtggggaccgcggcttctacttcagcaggcccgcaagccgtgtgagccgtcgcagccgtggcatcgttgaggagtgctgtttccgcagctgtgacctggccctcctggagacgtactgtgctacccccgccaagtccgagggcgcgccggcacaccccggccgtcccagagcagtgcccacacagtgcgacgtcccccccaacagccgcttcgattgcgcccctgacaaggccatcacccaggaacagtgcgaggcccgcggctgctgctacatccctgcaaagcaggggctgcagggagcccagatggggcagccctggtgcttcttcccacccagctaccccagctacaagctggagaacctgagctcctctgaaatgggctacacggccaccctgacccgtaccacccccaccttcttccccaaggacatcctgaccctgcggctggacgtgatgatggagactgagaaccgcctccacttcacgatcaaagatccagctaacaggcgctacgaggtgcccttggagaccccgcgtgtccacagccgggcaccgtccccactctacagcgtggagttctccgaggagcccttcggggtgatcgtgcaccggcagctggacggccgcgtgctgctgaacacgacggtggcgcccctgttctttgcggaccagttccttcagctgtccacctcgctgccctcgcagtatatcacaggcctcgccgagcacctcagtcccctgatgctcagcaccagctggaccaggatcaccctgtggaaccgggaccttgcgcccacgcccggtgcgaacctctacgggtctcaccctttctacctggcgctggaggacggcgggtcggcacacggggtgttcctgctaaacagcaatgccatggatgtggtcctgcagccgagccctgcccttagctggaggtcgacaggtgggatcctggatgtctacatcttcctgggcccagagcccaagagcgtggtgcagcagtacctggacgttgtgggatacccgttcatgccgccatactggggcctgggcttccacctgtgccgctggggctactcctccaccgctatcacccgccaggtggtggagaacatgaccagggcccacttccccctggacgtccaatggaacgacctggactacatggactcccggagggacttcacgttcaacaaggatggcttccgggacttcccggccatggtgcaggagctgcaccagggcggccggcgctacatgatgatcgtggatcctgccatcagcagctcgggccctgccgggagctacaggccctacgacgagggtctgcggaggggggttttcatcaccaacgagaccggccagccgctgattgggaaggtatggcccgggtccactgccttccccgacttcaccaaccccacagccctggcctggtgggaggacatggtggctgagttccatgaccaggtgcccttcgacggcatgtggattgacatgaacgagccttccaacttcatcagaggctctgaggacggctgccccaacaatgagctggagaacccaccctacgtgcctggggtggttggggggaccctccaggcggccaccatctgtgcctccagccaccagtttctctccacacactacaacctgcacaacctctacggcctgaccgaagccatcgcctcccacagggcgctggtgaaggctcgggggacacgcccatttgtgatctcccgctcgacctttgctggccacggccgatacgccggccactggacgggggacgtgtggagctcctgggagcagctcgcctcctccgtgccagaaatcctgcagtttaacctgctgggggtgcctctggtcggggccgacgtctgcggcttcctgggcaacacctcagaggagctgtgtgtgcgctggacccagctgggggccttctaccccttcatgcggaaccacaacagcctgctcagtctgccccaggagccgtacagcttcagcgagccggcccagcaggccatgaggaaggccctcaccctgcgctacgcactcctcccccacctctacacactgttccaccaggcccacgtcgcgggggagaccgtggcccggcccctcttcctggagttccccaaggactctagcacctggactgtggaccaccagctcctgtggggggaggccctgctcatcaccccagtgctccaggccgggaaggccgaagtgactggctacttccccttgggcacatggtacgacctgcagacggtgccaatagaggcccttggcagcctcccacccccacctgcagctccccgtgagccagccatccacagcgaggggcagtgggtgacgctgccggcccccctggacaccatcaacgtccacctccgggctgggtacatcatccccctgcagggccctggcctcacaaccacagagtcccgccagcagcccatggccctggctgtggccctgaccaagggtggagaggcccgaggggagctgttctgggacgatggagagagcctggaagtgctggagcgaggggcctacacacaggtcatcttcctggccaggaataacacgatcgtgaatgagctggtacgtgtgaccagtgagggagctggcctgcagctgcagaaggtgactgtcctgggcgtggccacggcgccccagcaggtcctctccaacggtgtccctgtctccaacttcacctacagccccgacaccaaggtcctggacatctgtgtctcgctgttgatgggagagcagtttctcgtcagctggtgttagcgagcggccgctcttagtagcagtatcgatcccagcccacttttccccaatacgactacgagatctgtggcttctagctgcccgggtggcatccctgtgacccctccccagtgcctctcctggccctggaagttgccactccagtgcccaccagccttgtcctaataaaattaagttgcatcattttgtctgactaggtgtccttctataatattatggggtggaggggggtggtatggagcaaggggcaagttgggaaggccgacccgcgaatagtagatcccgcgagggcttgaatctatcacctagagtacaccctagagaatagctagctctcaatgactaaggactaaacttggtatttcgactgaagcctgtcccctcactgttggcgctaggaggagagttcgtagaaaggatagtacgatttaagtatctctaagccttgtgaagcactaaggttgcgtacagacgtgcttgaattacggataattcgggaaccttgggacacacaaaaaaccaacacacagatctaatgaaaataaagatcttttatttaggcgcctctgacttcctggggattgacctgagttctactctagcgtttgctggttcggtgaactaatctgtgagatccccaactctccgtttgggatctccactctctggtgtcctaaccttggtgccccactgtctactgctagtgagaccttacgcgctgagaaacgtggcgttactctaactaagcgacgcgcacttgcactctgaatacttctaccgtaactaaccccggacctcagaactcagacggatctacgctgtccatcaacaccagacttagattacctctgttaagtttaattaagctcgcgaaggaacccctagtgatggagttggccactccctctctgcgcgctcgctcgctcactgaggccgggcgaccaaaggtcgcccgacgcccgggctttgcccgggcggcctcagtgagcgagcgagcgcgcagagagggagtggccaa

SEQ ID NO: 62 - DNA, 4576 bp, Artificial Sequence
  Description of Artificial Sequence: Synthetic polynucleotide
ttggccactccctctctgcgcgctcgctcgctcactgaggccgggcgaccaaaggtcgcccgacgcccgggctttgcccgggcggcctcagtgagcgagcgagcgcgcagagagggagtggccaactccatcactaggggttcctgagtttaaacttcgtcgacgattcgagcttgggctgcaggtcgagggcactgggaggatgttgagtaagatggaaaactactgatgacccttgcagagacagagtattaggacatgtttgaacaggggccgggcgatcagcaggtagctctagaggatccccgtctgtctgcacatttcgtagagcgagtgttccgatactctaatctccctaggcaaggttcatatttgtgtaggttacttattctccttttgttgactaagtcaataatcagaatcagcaggtttggagtcagcttggcagggatcagcagcctgggttggaaggagggggtataaaagccccttcaccaggagaagccgtcacacagactagccctaaggtaagttggcgccgtttaagggatggttggttggtggggtattaatgtttaattaccttttttacaggcctgaactaggcgcgccaccgccaccatgcttaggggtccggggcccgggctgctgctgctggccgtccagtgcctggggacagcggtgccctccacgggagcctcgaagagcaagagggctctgtgcggcggggagctggtggacaccctccagttcgtctgtggggaccgcggcttctacttcagcaggcccgcaagccgtgtgagccgtcgcagccgtggcatcgttgaggagtgctgtttccgcagctgtgacctggccctcctggagacgtactgtgctacccccgccaagtccgagggcgcgccggcacaccccggccgtcccagagcagtgcccacacagtgcgacgtcccccccaacagccgcttcgattgcgcccctgacaaggccatcacccaggaacagtgcgaggcccgcggctgctgctacatccctgcaaagcaggggctgcagggagcccagatggggcagccctggtgcttcttcccacccagctaccccagctacaagctggagaacctgagctcctctgaaatgggctacacggccaccctgacccgtaccacccccaccttcttccccaaggacatcctgaccctgcggctggacgtgatgatggagactgagaaccgcctccacttcacgatcaaagatccagctaacaggcgctacgaggtgcccttggagaccccgcgtgtccacagccgggcaccgtccccactctacagcgtggagttctccgaggagcccttcggggtgatcgtgcaccggcagctggacggccgcgtgctgctgaacacgacggtggcgcccctgttctttgcggaccagttccttcagctgtccacctcgctgccctcgcagtatatcacaggcctcgccgagcacctcagtcccctgatgctcagcaccagctggaccaggatcaccctgtggaaccgggaccttgcgcccacgcccggtgcgaacctctacgggtctcaccctttctacctggcgctggaggacggcgggtcggcacacggggtgttcctgctaaacagcaatgccatggatgtggtcctgcagccgagccctgcccttagctggaggtcgacaggtgggatcctggatgtctacatcttcctgggcccagagcccaagagcgtggtgcagcagtacctggacgttgtgggatacccgttcatgccgccatactggggcctgggcttccacctgtgccgctggggctactcctccaccgctatcacccgccaggtggtggagaacatgaccagggcccacttccccctggacgtccaatggaacgacctggactacatggactcccggagggacttcacgttcaacaaggatggcttccgggacttcccggccatggtgcaggagctgcaccagggcggccggcgctacatgatgatcgtggatcctgccatcagcagctcgggccctgccgggagctacaggccctacgacgagggtctgcggaggggggttttcatcaccaacgagaccggccagccgctgattgggaaggtatggcccgggtccactgccttccccgacttcaccaaccccacagccctggcctggtgggaggacatggtggctgagttccatgaccaggtgcccttcgacggcatgtggattgacatgaacgagccttccaacttcatcagaggctctgaggacggctgccccaacaatgagctggagaacccaccctacgtgcctggggtggttggggggaccctccaggcggccaccatctgtgcctccagccaccagtttctctccacacactacaacctgcacaacctctacggcctgaccgaagccatcgcctcccacagggcgctggtgaaggctcgggggacacgcccatttgtgatctcccgctcgacctttgctggccacggccgatacgccggccactggacgggggacgtgtggagctcctgggagcagctcgcctcctccgtgccagaaatcctgcagtttaacctgctgggggtgcctctggtcggggccgacgtctgcggcttcctgggcaacacctcagaggagctgtgtgtgcgctggacccagctgggggccttctaccccttcatgcggaaccacaacagcctgctcagtctgccccaggagccgtacagcttcagcgagccggcccagcaggccatgaggaaggccctcaccctgcgctacgcactcctcccccacctctacacactgttccaccaggcccacgtcgcgggggagaccgtggcccggcccctcttcctggagttccccaaggactctagcacctggactgtggaccaccagctcctgtggggggaggccctgctcatcaccccagtgctccaggccgggaaggccgaagtgactggctacttccccttgggcacatggtacgacctgcagacggtgccaatagaggcccttggcagcctcccacccccacctgcagctccccgtgagccagccatccacagcgaggggcagtgggtgacgctgccggcccccctggacaccatcaacgtccacctccgggctgggtacatcatccccctgcagggccctggcctcacaaccacagagtcccgccagcagcccatggccctggctgtggccctgaccaagggtggagaggcccgaggggagctgttctgggacgatggagagagcctggaagtgctggagcgaggggcctacacacaggtcatcttcctggccaggaataacacgatcgtgaatgagctggtacgtgtgaccagtgagggagctggcctgcagctgcagaaggtgactgtcctgggcgtggccacggcgccccagcaggtcctctccaacggtgtccctgtctccaacttcacctacagccccgacaccaaggtcctggacatctgtgtctcgctgttgatgggagagcagtttctcgtcagctggtgttagcgagcggccgctcttagtagcagtatcgatcccagcccacttttccccaatacgactacgagatctgtggcttctagctgcccgggtggcatccctgtgacccctccccagtgcctctcctggccctggaagttgccactccagtgcccaccagccttgtcctaataaaattaagttgcatcattttgtctgactaggtgtccttctataatattatggggtggaggggggtggtatggagcaaggggcaagttgggaaggccgacccgcgaatagtagatcccgcgagggcttgaatctatcacctagagtacaccctagagaatagctagctctcaatgactaaggactaaacttggtatttcgactgaagcctgtcccctcactgttggcgctaggaggagagttcgtagaaaggatagtacgatttaagtatctctaagccttgtgaagcactaaggttgcgtacagacgtgcttgaattacggataattcgggaaccttgggacacacaaaaaaccaacacacagatctaatgaaaataaagatcttttatttaggcgcctctgacttcctggggattgacctgagttctactctagcgtttgctggttcggtgaactaatctgtgagatccccaactctccgtttgggatctccactctctggtgtcctaaccttggtgccccactgtctactgctagtgagaccttacgcgctgagaaacgtggcgttactctaactaagcgacgcgcacttgcactctgaatacttctaccgtaactaaccccggacctcagaactcagacggatctacgctgtccatcaacaccagacttagattacctctgttaagtttaattaagctcgcgaaggaacccctagtgatggagttggccactccctctctgcgcgctcgctcgctcactgaggccgggcgaccaaaggtcgcccgacgcccgggctttgcccgggcggcctcagtgagcgagcgagcgcgcagagagggagtggccaa

SEQ ID NO: 63 - protein, 6 aa, Homo sapiens
YRPSET

SEQ ID NO: 64 - protein, 11 aa, Rattus norvegicus
LLLLAVLCLGT

SEQ ID NO: 65 - DNA, 20 bp, Unknown
  Description of Unknown: Collagen Stability (CS) sequence
cccagcccacttttccccaa

SEQ ID NO: 66 - protein, 6 aa, Unknown
  Description of Unknown: Collagen Stability (CS) sequence
PSPLFP

SEQ ID NO: 67 - DNA, 192 bp, Artificial Sequence
  Description of Artificial Sequence: Synthetic polynucleotide
gctctgtgcggcggggagctggtggacaccctccagttcgtctgtggggaccgcggcttctacttcagcaggcccgcaagccgtgtgagccgtcgcagccgtggcatcgttgaggagtgctgtttccgcagctgtgacctggccctcctggagacgtactgtgctacccccgccaagtccgagggcgcgccg

SEQ ID NO: 68 - DNA, 189 bp, Artificial Sequence
  Description of Artificial Sequence: Synthetic polynucleotide
ctgtgcggcggggagctggtggacaccctccagttcgtctgtggggaccgcggcttctacttcagcaggcccgcaagccgtgtgagccgtcgcagccgtggcatcgttgaggagtgctgtttccgcagctgtgacctggccctcctggagacgtactgtgctacccccgccaagtccgagggcgcgccg

SEQ ID NO: 69 - DNA, 210 bp, Artificial Sequence
  Description of Artificial Sequence: Synthetic polynucleotide
gcttaccgccccagtgagaccctgtgcggcggggagctggtggacaccctccagttcgtctgtggggaccgcggcttctacttcagcaggcccgcaagccgtgtgagccgtcgcagccgtggcatcatggaggagtgctgtttccgcagctgtgacctggccctcctggagacgtactgtgctacccccgccaagtccgagggcgcgccg

SEQ ID NO: 70 - DNA, 264 bp, Artificial Sequence
  Description of Artificial Sequence: Synthetic polynucleotide
atgggaatcccaatggggaagtcgatgctggtgcttctcaccttcttggccttcgcctcgtgctgcattgctgctctgtgcggcggggagctggtggacaccctccagttcgtctgtggggaccgcggcttctacttcagcaggcccgcaagccgtgtgagccgtcgcagccgtggcatcgttgaggagtgctgtttccgcagctgtgacctggccctcctggagacgtactgtgctacccccgccaagtccgagggcgcgccg

SEQ ID NO: 71 - DNA, 300 bp, Artificial Sequence
  Description of Artificial Sequence: Synthetic polynucleotide
taggcgcctctgacttcctggggattgacctgagttctactctagcgtttgctggttcggtgaactaatctgtgagatccccaactctccgtttgggatctccactctctggtgtcctaaccttggtgccccactgtctactgctagtgagaccttacgcgctgagaaacgtggcgttactctaactaagcgacgcgcacttgcactctgaatacttctaccgtaactaaccccggacctcagaactcagacggatctacgctgtccatcaacaccagacttagattacctctgttaagt

SEQ ID NO: 72 - DNA, 2859 bp, Homo sapiens
atgggagtgaggcacccgccctgctcccaccggctcctggccgtctgcgccctcgtgtccttggcaaccgctgcactcctggggcacatcctactccatgatttcctgctggttccccgagagctgagtggctcctccccagtcctggaggagactcacccagctcaccagcagggagccagcagaccagggccccgggatgcccaggcacaccccggccgtcccagagcagtgcccacacagtgcgacgtcccccccaacagccgcttcgattgcgcccctgacaaggccatcacccaggaacagtgcgaggcccgcggctgttgctacatccctgcaaagcaggggctgcagggagcccagatggggcagccctggtgcttcttcccacccagctaccccagctacaagctggagaacctgagctcctctgaaatgggctacacggccaccctgacccgtaccacccccaccttcttccccaaggacatcctgaccctgcggctggacgtgatgatggagactgagaaccgcctccacttcacgatcaaagatccagctaacaggcgctacgaggtgcccttggagaccccgcatgtccacagccgggcaccgtccccactctacagcgtggagttctccgaggagcccttcggggtgatcgtgcgccggcagctggacggccgcgtgctgctgaacacgacggtggcgcccctgttctttgcggaccagttccttcagctgtccacctcgctgccctcgcagtatatcacaggcctcgccgagcacctcagtcccctgatgctcagcaccagctggaccaggatcaccctgtggaaccgggaccttgcgcccacgcccggtgcgaacctctacgggtctcaccctttctacctggcgctggaggacggcgggtcggcacacggggtgttcctgctaaacagcaatgccatggatgtggtcctgcagccgagccctgcccttagctggaggtcgacaggtgggatcctggatgtctacatcttcctgggcccagagcccaagagcgtggtgcagcagtacctggacgttgtgggatacccgttcatgccgccatactggggcctgggcttccacctgtgccgctggggctactcctccaccgctatcacccgccaggtggtggagaacatgaccagggcccacttccccctggacgtccagtggaacgacctggactacatggactcccggagggacttcacgttcaacaaggatggcttccgggacttcccggccatggtgcaggagctgcaccagggcggccggcgctacatgatgatcgtggatcctgccatcagcagctcgggccctgccgggagctacaggccctacgacgagggtctgcggaggggggttttcatcaccaacgagaccggccagccgctgattgggaaggtatggcccgggtccactgccttccccgacttcaccaaccccacagccctggcctggtgggaggacatggtggctgagttccatgaccaggtgcccttcgacggcatgtggattgacatgaacgagccttccaacttcatcaggggctctgaggacggctgccccaacaatgagctggagaacccaccctacgtgcctggggtggttggggggaccctccaggcggccaccatctgtgcctccagccaccagtttctctccacacactacaacctgcacaacctctacggcctgaccgaagccatcgcctcccacagggcgctggtgaaggctcgggggacacgcccatttgtgatctcccgctcgacctttgctggccacggccgatacgccggccactggacgggggacgtgtggagctcctgggagcagctcgcctcctccgtgccagaaatcctgcagtttaacctgctgggggtgcctctggtcggggccgacgtctgcggcttcctgggcaacacctcagaggagctgtgtgtgcgctggacccagctgggggccttctaccccttcatgcggaaccacaacagcctgctcagtctgccccaggagccgtacagcttcagcgagccggcccagcaggccatgaggaaggccctcaccctgcgctacgcactcctcccccacctctacacactgttccaccaggcccacgtcgcgggggagaccgtggcccggcccctcttcctggagttccccaaggactctagcacctggactgtggaccaccagctcctgtggggggaggccctgctcatcaccccagtgctccaggccgggaaggccgaagtgactggctacttccccttgggcacatggtacgacctgcagacggtgccagtagaggcccttggcagcctcccacccccacctgcagctccccgtgagccagccatccacagcgaggggcagtgggtgacgctgccggcccccctggacaccatcaacgtccacctccgggctgggtacatcatccccctgcagggccctggcctcacaaccacagagtcccgccagcagcccatggccctggctgtggccctgaccaagggtggggaggcccgaggggagctgttctgggacgatggagagagcctggaagtgctggagcgaggggcctacacacaggtcatcttcctggccaggaataacacgatcgtgaatgagctggtacgtgtgaccagtgagggagctggcctgcagctgcagaaggtgactgtcctgggcgtggccacggcgccccagcaggtcctctccaacggtgtccctgtctccaacttcacctacagccccgacaccaaggtcctggacatctgtgtctcgctgttgatgggagagcagtttctcgtcagctggtgttag

SEQ ID NO: 73 - DNA, 2859 bp, Artificial Sequence; identical to SEQ ID NO: 55
  Description of Artificial Sequence: Synthetic polynucleotide

SEQ ID NO: 74 - DNA, 2859 bp, Artificial Sequence
  Description of Artificial Sequence: Synthetic polynucleotide
atgggagtaaggcatccaccatgctctcataggctcctcgccgtatgcgcgttggtcagccttgcgaccgcagcccttctgggccacattctgctgcacgattttctcctcgttccgcgagagttgtctggaagctctccagtactcgaggaaacgcatccagcgcaccagcagggcgcatctcggcccggtccaagagacgcacaagcacaccccgggcggccaagggctgttccaactcagtgcgatgttccgcccaattcaagattcgattgcgcacccgataaagctattacgcaagagcagtgcgaagctcgcggctgctgttatatcccggcaaagcagggccttcagggcgctcaaatgggacagccgtggtgtttttttccaccgtcatatccatcctacaagcttgagaacctgtcctcatctgagatgggatacacggctaccctgacacggacaacgccaaccttcttccccaaagacattcttacactgcgactggacgtgatgatggaaacagagaatcgactgcattttactataaaggacccggctaacaggcggtacgaggttcccctggagacccctcgcgtacattctcgagctcctagcccgctctactccgtggaattttccgaagagccgtttggtgtaatagtgcatcgccaacttgacggtcgcgtactgctcaacaccacggtggcacctctgttctttgcggaccaattcttgcagctctctacttctctcccttcacaatatataaccgggctcgcagagcatctgtccccgttgatgttgtctacgtcatggacaagaatcacgctttggaaccgagacctggcccctacgccgggagctaatctgtacgggtcacatccattctatttggctctggaggatggcggtagtgcacacggggtatttctgcttaactctaatgcgatggatgtcgtgctgcagccatcccctgcgctgtcttggcgaagcaccggcggcattctggacgtgtatatctttcttggacccgagccaaagagcgtcgtacaacagtacctcgacgtagtggggtatcccttcatgcccccctattgggggctcggtttccatttgtgcagatggggctactcatccactgcaataacacgccaggtagtagaaaatatgacccgggctcactttcctcttgacgtgcagtggaatgaccttgactacatggatagtcgccgcgatttcaccttcaacaaggacggtttcagagatttccctgctatggtgcaagagctgcaccaagggggccgccggtatatgatgatcgtagatccggccatatctagctctggccctgccgggtcttatagaccgtatgatgaaggtctgaggcgcggtgtcttcatcacaaacgaaactggtcaaccactcatcggcaaggtctggcccgggtcaacggcgtttcctgatttcactaatccgacggcgctggcttggtgggaagatatggttgccgagtttcacgatcaagttccgtttgacggaatgtggattgatatgaatgagccatctaactttatacgcggtagtgaagatggttgccctaataatgagttggaaaacccaccctatgtacccggtgtcgtcggcggcacgcttcaggccgctaccatatgcgctagcagtcaccaattccttagtacgcactataacctccataatttgtacggacttactgaggcgattgctagtcatcgagcgctcgtaaaagctcgcggtacccggcccttcgtgattagtaggagtacattcgccgggcatggtcgatatgcgggccactggactggggatgtctggtccagctgggagcagttggcttcctcagtccctgaaattttgcaatttaacctgcttggtgtgccgcttgttggcgcggacgtttgcgggtttttgggtaataccagtgaagaactgtgtgttaggtggacacagcttggggcattctatcctttcatgcggaatcacaacagtcttctgtcattgccgcaggaaccgtactctttcagtgagcctgcccagcaggcgatgcggaaggccctcacattgcgatacgcacttctcccgcatctttatacgcttttccaccaggcccatgttgcgggcgagacagtcgccaggccactcttccttgagtttccgaaagacagcagcacctggacggttgaccatcagctcctctggggtgaagctttgttgattacccccgtgctgcaggcgggcaaggcggaagtaacaggctacttcccgctgggaacctggtatgaccttcagacagtgccgatcgaagctcttggctcactgccaccacctccggcagccccgcgggaaccagcgattcactccgagggccaatgggttacgcttccggctccacttgacaccatcaatgtccatcttcgcgcgggatacattatcccgcttcagggacctggcttgactactacagagtctcgccaacagccgatggcactcgcagtagctctgactaaaggaggtgaggcgcggggtgaactcttttgggatgatggggaatccctggaggttttggagaggggtgcgtacacgcaagtaatctttctcgctcgaaacaatacgatcgtcaatgagctcgtcagggtaacgtctgagggggccggtttgcaacttcagaaagtcactgtacttggcgtagccactgctcctcaacaagtcctttcaaacggggttcctgtgtcaaactttacctattcacccgataccaaggttttggacatatgcgtgtctttgttgatgggcgaacaatttctggtttcttggtgctag

SEQ ID NO: 75 - DNA, 2859 bp, Artificial Sequence
  Description of Artificial Sequence: Synthetic polynucleotide
atgggcgttagacaccctccatgctctcatagactgctggccgtgtgtgctctggtgtctcttgctacagctgccctgctgggacatatcctgctgcacgattttctgctggtgcccagagagctgtctggcagctctccagtgctggaagaaacacaccctgcacatcagcagggcgcctctagacctggacctagagatgctcaagcccatcctggcagacctagagccgtgcctacacagtgtgacgtgccacctaacagcagattcgactgcgcccctgacaaggccatcacacaagagcagtgtgaagccagaggctgctgctacattcctgccaaacaaggactgcagggcgctcagatgggacagccttggtgcttcttcccaccatcttaccccagctacaagctggaaaacctgagcagcagcgagatgggctacaccgccacactgaccagaaccacacctacattcttcccaaaggacatcctgacactgcggctggacgtgatgatggaaaccgagaaccggctgcacttcaccatcaaggaccccgccaatagaagatacgaggtgcccctggaaacccctagagtgcattctagagccccatctccactgtacagcgtggaattcagcgaggaacccttcggcgtgatcgtgcacagacagctggatggcagagtgctgctgaataccacagtggcccctctgttcttcgccgaccagtttctgcagctgagcacaagcctgcctagccagtatatcacaggcctggccgaacacctgtctccactgatgctgagcaccagctggaccagaatcaccctgtggaacagagatctggcccctacacctggcgccaatctgtacggctctcaccctttttatctggccctggaagatggcggaagcgcccacggtgtctttctgctgaacagcaacgccatggacgtggtgctgcaaccatctcctgctctgtcttggagaagcaccggcggcatcctggacgtgtacatctttctgggccctgagcctaagagcgtggtgcagcagtatctggatgtcgtgggctaccccttcatgcctccttattggggcctgggcttccacctgtgtagatggggatacagctccaccgccatcaccagacaggtggtggaaaacatgacccgggctcacttcccactggatgtgcagtggaacgacctggactacatggacagcagacgggacttcaccttcaacaaggacggcttcagagacttccccgccatggtgcaagaactgcatcaaggcggcagacggtacatgatgatcgtggatcctgccatctcttctagcggccctgccggctcttacagaccttatgatgagggcctgagaagaggcgtgttcatcaccaatgagacaggccagcctctgatcggcaaagtgtggcctggatccaccgcctttccagacttcaccaatcctaccgctctggcttggtgggaagatatggtggccgagtttcacgatcaggtgcccttcgacggcatgtggatcgacatgaacgagcccagcaacttcatcagaggcagcgaggacggctgccccaacaacgaactggaaaatcctccttacgtgccaggcgttgtcggaggaacactgcaggccgccacaatttgtgccagcagccatcagtttctgagcacccactacaacctgcacaacctgtacggcctgaccgaggccattgcttctcacagagccctggttaaggccagaggcaccagacctttcgtgatcagcagaagcacattcgccggccacggcagatatgctggacattggacaggcgacgtgtggtctagttgggagcagctggctagctctgtgcccgagatcctgcagtttaatctgctgggagtgcctctcgtgggcgccgatgtttgtggctttctgggaaacacctccgaggaactgtgtgtgcgttggacacagctgggcgccttctatcccttcatgagaaaccacaacagcctgctgagcctgcctcaagagccttacagctttagcgaacccgcacagcaggccatgagaaaggccctgactctgagatacgctctgctgccccacctgtacaccctgtttcatcaggctcatgtggccggggaaacagtggctagacccctgttcctggaattccccaaggatagcagcacctggaccgtggatcatcagctgctttggggcgaagctctgctgattacacctgtgctgcaggctggcaaggccgaagtgacaggctattttcccctcggcacttggtacgacctgcagacagtgcctattgaggccctgggatctcttcctccacctcctgctgctcctagagagcctgccattcactctgaaggccagtgggttacactgcccgctcctctggacaccatcaatgtgcacctgagagccggctacatcatccctctgcaaggccctggactgaccacaaccgaaagcagacagcagccaatggctctggccgtggcactgacaaaaggcggagaagctagaggcgagctgttctgggatgatggcgagtctctggaagtgctcgagagaggcgcctacacacaagtgatctttctcgcccggaacaacaccatcgtgaacgaactcgtcagagtgaccagtgaaggtgccggactgcagctccagaaagtgacagtgcttggagtggccacagctcctcagcaggttctgtctaatggcgtgcccgtgtccaacttcacatacagccctgacaccaaggtgctggatatctgcgtgtcactgctgatgggcgagcagttcctggtgtcctggtgttga

SEQ ID NO: 76 - DNA, 2859 bp, Artificial Sequence
  Description of Artificial Sequence: Synthetic polynucleotide
atgggcgtgaggcacccaccttgctctcacaggctgctggccgtgtgcgcactggtgagcctggcaaccgccgccctgctgggccacatcctgctgcacgacttcctgctggtgccaagggagctgtccggaagctccccagtgctggaggagacccacccagcacaccagcagggagcatctaggccaggccccagagatgcacaggcacacccaggcagacccagagcagtgccaacccagtgcgacgtgccaccaaacagccggtttgactgtgcccccgataaggccatcacacaggagcagtgcgaggccagaggctgctgttatatccctgcaaagcagggactgcagggagcacagatgggacagccatggtgtttctttcctccatcttaccccagctataagctggagaatctgtctagctccgagatgggctacacagccaccctgacaagaaccacaccaacattctttcccaaggatatcctgaccctgcggctggacgtgatgatggagacagagaacagactgcacttcaccatcaaggatcccgccaatcggagatatgaggtgcctctggagaccccaagggtgcactctagggcacctagcccactgtactccgtggagttctctgaggagccatttggcgtgatcgtgcaccggcagctggatggcagagtgctgctgaacaccacagtggcccccctgttctttgccgaccagttcctgcagctgagcacatccctgccctcccagtatatcaccggcctggccgagcacctgtctcctctgatgctgtctaccagctggacaaggatcaccctgtggaacagggacctggcaccaacccctggagcaaatctgtacggcagccaccccttctatctggccctggaggatggaggatccgcccacggcgtgtttctgctgaactctaatgccatggacgtggtgctgcagccaagccccgccctgtcctggaggtctaccggaggcatcctggacgtgtacatcttcctgggccctgagccaaagtccgtggtgcagcagtacctggacgtggtgggctatcctttcatgcccccttactggggactgggatttcacctgtgcagatggggctattctagcacagccatcacccggcaggtggtggagaacatgaccagagcccactttccactggatgtgcagtggaatgacctggattacatggactccaggcgcgacttcaccttcaacaaggacggcttccgggattttcccgccatggtgcaggagctgcaccagggaggccggagatacatgatgatcgtggatcctgcaatctcctctagcggacctgcaggaagctacagaccatatgacgagggcctgaggcgcggcgtgttcatcacaaacgagaccggccagcctctgatcggcaaggtctggccaggctccaccgccttcccagacttcaccaatccaaccgccctggcatggtgggaggacatggtggccgagttccacgaccaggtgccttttgatggcatgtggatcgacatgaacgagccatctaatttcatcaggggaagcgaggacggatgcccaaacaatgagctggagaatccaccatatgtgcctggagtggtgggaggcacactgcaggcagcaaccatctgtgcctcctctcaccagtttctgtctacacactataacctgcacaatctgtacggactgaccgaggcaatcgcaagccacagagccctggtgaaggcaaggggaacaaggcctttcgtgatctccaggtctacctttgccggacacggccgctacgcaggacactggaccggcgacgtgtggagctcctgggagcagctggcctctagcgtgccagagatcctgcagttcaacctgctgggagtgccactggtgggagcagacgtgtgcggctttctgggcaatacaagcgaggagctgtgcgtgcggtggacccagctgggagccttctatccctttatgagaaaccacaatagcctgctgtccctgcctcaggagccatacagcttctccgagcctgcacagcaggcaatgaggaaggccctgacactgagatatgccctgctgccacacctgtacaccctgtttcaccaggcacacgtggcaggagagacagtggccaggcccctgttcctggagtttcctaaggattcctctacctggacagtggaccaccagctgctgtggggagaggccctgctgatcacccccgtgctgcaggcaggcaaggcagaggtgacaggctatttccctctgggcacatggtacgatctgcagaccgtgccaatcgaggccctgggaagcctgcctccaccacctgcagcaccaagggagcctgccatccactccgagggacagtgggtgacactgccagcacctctggacaccatcaacgtgcacctgagggccggctatatcatcccactgcagggacctggactgaccacaaccgagagcaggcagcagccaatggcactggcagtggccctgaccaagggaggcgaggccaggggcgagctgttctgggacgatggagagtccctggaggtgctggagaggggagcctacacacaggtcatcttcctggccaggaacaatacaatcgtgaatgagctggtgcgcgtgacctctgagggagcaggactgcagctgcagaaggtgacagtgctgggagtggcaaccgcaccacagcaggtgctgtccaacggcgtgcccgtgagcaatttcacatactcccctgataccaaggtgctggacatctgcgtgagcctgctgatgggcgagcagtttctggtgtcctggtgttga

SEQ ID NO: 77 - DNA, 96 bp, Artificial Sequence
  Description of Artificial Sequence: Synthetic oligonucleotide
ccgggcggagtgtgttagtctctccagagggaggctggttccccagggaagcagagcctgtgtgcgggcagcagctgtgtgcgggcctgggggttg

SEQ ID NO: 78 - DNA, 2032 bp, Artificial Sequence
  Description of Artificial Sequence: Synthetic polynucleotide
aagtgccgacccgtctgaatagtagatcccgtcgagggcttgaatctatcaccatagagtacacccatagagaatagctagctctcaattgactaaggactaaacttggtatttcgactgaagcctgtcactcctcactgttggcgctagtgaggagagttcgtagaaaggatagtacgatttaagtatctctaagccttgtgaagcactaaggttgcgtacagacgtgcttgaattacggataattcgtggaaccttgggatagtgcgcctctgacttctctgtgggtattgacctgagttctactctagcgtttgctggttcgtgtgaactaatctgtgagatcctcacaactctccgtttgggatctccactctctggtgtcctaacacttggtgccacacactgtctactgctagtgagaccttatctgtctgctgagaaactgtgtgctgttactctaactaagcgatctgtctgcacttgcactctgaatacttctaccgtaactaactctcacggactctcagaactcagacggatctactgctgtctcaaatcaacaccagacttagattactctctgttaagttgaaagactctctacaaatccacactgtggtctagttgaacaagcttgagagagtatctgtctgcatatcaagagtgagagtgtctctggatttggagtagttgagaagtggaaccatagcgagtctactgcctgtgtcaacttcaattagagtgttgaatagaggactgactctcgaattgaagtatcctgccaactgtctcaacttaattcaaacgctattttcgttaactgtctcaactctcgtcaagttgagaggaagagtagagccatagtttgaagcctgataagagttcgtctgaggacgtattgtgtgtcaagacgaactgaaggatttcaacaaatagagaagcttgacactgtccttcaactgtctgaactgtagcactctggatagctagctagcgtttgtagatagtttcaaggatagcaaccaacaacacgatagtttagaaattgttctagatcttctgctactactcgagagatagttgacttctagaagactctggatagagagcttcctgtggtttctatttcaacacttctgagcgatttagatagaggcgtcaattgagaacaaaaactggacacctgtttctagaacactagtgctagtcttctcaaggcttgatactgtcctgccactcaagagaaatgttctggcacctgcacttgcactggggacagcctattttgctagtttgttttgtttcgttttgttttgatggagagcgtatgttagtactatcgattcacacaaaaaaccaacacacagatgtaatgaaaataaagatattttattagagagcgagtggatagtttagagtcgcttgagacttatcctgtgtccaactagccaagagtagagagagagtgactaggtggatcgagagatcgtcgtctatttgactgctagcctgtgttctcgtcgtagtccaaatcttcaatactctggcgactagtaacttgaatctgtgtatctaacacgacaaggctactcctttgagtttctagtgataagtgcgactggatctagctagttgagtttctagaaactactgtccaaagctactagcactaaggtctctctgtgaaagagtggtctacttttgaggagaagaaagttctagcgtagtagcaattcctttggtggaagaggctatcgagagtcaactctgccttcaagtagcttccaaaagtaaacaactgtggatcgtttctaatctcaagacgcttgaaagagcaagagcttgtattgatcgaggtggtattgagatagttaagactgtccaagaattacgactaccaaagatcttcgttagcaacgaaacttgagaacgtttctaagcctgtgacttaaactctcctgcttggtgcctgcctttgaatctggactcgtagagcacgaggaagagaagtcgatttctagagcctgct

SEQ ID NO: 79 - DNA, 4256 bp, Artificial Sequence
  Description of Artificial Sequence: Synthetic polynucleotide
tcgagcttgggctgcaggtcgagggcactgggaggatgttgagtaagatggaaaactactgatgacccttgcagagacagagtattaggacatgtttgaacaggggccgggcgatcagcaggtagctctagaggatccccgtctgtctgcacatttcgtagagcgagtgttccgatactctaatctccctaggcaaggttcatatttgtgtaggttacttattctccttttgttgactaagtcaataatcagaatcagcaggtttggagtcagcttggcagggatcagcagcctgggttggaaggagggggtataaaagccccttcaccaggagaagccgtcacacagactagccctaaggtaagttggcgccgtttaagggatggttggttggtggggtattaatgtttaattaccttttttacaggcctgaactaggcgcgccaccgccaccatgccgtcttctgtctcgtggggcatcctcctgctggcaggcctgtgctgcctggtccctgtctccctggctgcttaccgccccagtgagaccctgtgcggcggggagctggtggacaccctccagttcgtctgtggggaccgcggcttctacttcagcaggcccgcaagccgtgtgagccgtcgcagccgtggcatcatggaggagtgctgtttccgcagctgtgacctggccctcctggagacgtactgtgctacccccgccaagtccgagggcgcgccggcacaccccggccgtcccagagcagtgcccacacagtgcgacgtcccccccaacagccgcttcgattgcgcccctgacaaggccatcacccaggaacagtgcgaggcccgcggctgctgctacatccctgcaaagcaggggctgcagggagcccagatggggcagccctggtgcttcttcccacccagctaccccagctacaagctggagaacctgagctcctctgaaatgggctacacggccaccctgacccgtaccacccccaccttcttccccaaggacatcctgaccctgcggctggacgtgatgatggagactgagaaccgcctccacttcacgatcaaagatccagctaacaggcgctacgaggtgcccttggagaccccgcgtgtccacagccgggcaccgtccccactctacagcgtggagttctccgaggagcccttcggggtgatcgtgcaccggcagctggacggccgcgtgctgctgaacacgacggtggcgcccctgttctttgcggaccagttccttcagctgtccacctcgctgccctcgcagtatatcacaggcctcgccgagcacctcagtcccctgatgctcagcaccagctggaccaggatcaccctgtggaaccgggaccttgcgcccacgcccggtgcgaacctctacgggtctcaccctttctacctggcgctggaggacggcgggtcggcacacggggtgttcctgctaaacagcaatgccatggatgtggtcctgcagccgagccctgcccttagctggaggtcgacaggtgggatcctggatgtctacatcttcctgggcccagagcccaagagcgtggtgcagcagtacctggacgttgtgggatacccgttcatgccgccatactggggcctgggcttccacctgtgccgctggggctactcctccaccgctatcacccgccaggtggtggagaacatgaccagggcccacttccccctggacgtccaatggaacgacctggactacatggactcccggagggacttcacgttcaacaaggatggcttccgggacttcccggccatggtgcaggagctgcaccagggcggccggcgctacatgatgatcgtggatcctgccatcagcagctcgggccctgccgggagctacaggccctacgacgagggtctgcggaggggggttttcatcaccaacgagaccggccagccgctgattgggaaggtatggcccgggtccactgccttccccgacttcaccaaccccacagccctggcctggtgggaggacatggtggctgagttccatgaccaggtgcccttcgacggcatgtggattgacatgaacgagccttccaacttcatcagaggctctgaggacggctgccccaacaatgagctggagaacccaccctacgtgcctggggtggttggggggaccctccaggcggccaccatctgtgcctccagccaccagtttctctccacacactacaacctgcacaacctctacggcctgaccgaagccatcgcctcccacagggcgctggtgaaggctcgggggacacgcccatttgtgatctcccgctcgacctttgctggccacggccgatacgccggccactggacgggggacgtgtggagctcctgggagcagctcgcctcctccgtgccagaaatcctgcagtttaacctgctgggggtgcctctggtcggggccgacgtctgcggcttcctgggcaacacctcagaggagctgtgtgtgcgctggacccagctgggggccttctaccccttcatgcggaaccacaacagcctgctcagtctgccccaggagccgtacagcttcagcgagccggcccagcaggccatgaggaaggccctcaccctgcgctacgcactcctcccccacctctacacactgttccaccaggcccacgtcgcgggggagaccgtggcccggcccctcttcctggagttccccaaggactctagcacctggactgtggaccaccagctcctgtggggggaggccctgctcatcaccccagtgctccaggccgggaaggccgaagtgactggctacttccccttgggcacatggtacgacctgcagacggtgccaatagaggcccttggcagcctcccacccccacctgcagctccccgtgagccagccatccacagcgaggggcagtgggtgacgctgccggcccccctggacaccatcaacgtccacctccgggctgggtacatcatccccctgcagggccctggcctcacaaccacagagtcccgccagcagcccatggccctggctgtggccctgaccaagggtggagaggcccgaggggagctgttctgggacgatggagagagcctggaagtgctggagcgaggggcctacacacaggtcatcttcctggccaggaataacacgatcgtgaatgagctggtacgtgtgaccagtgagggagctggcctgcagctgcagaaggtgactgtcctgggcgtggccacggcgccccagcaggtcctctccaacggtgtccctgtctccaacttcacctacagccccgacaccaaggtcctggacatctgtgtctcgctgttgatgggagagcagtttctcgtcagctggtgttagcgagcggccgctcttagtagcagtatcgatcccagcccacttttccccaatacgactacgagatctgtggcttctagctgcccgggtggcatccctgtgacccctccccagtgcctctcctggccctggaagttgccactccagtgcccaccagccttgtcctaataaaattaagttgcatcattttgtctgactaggtgtccttctataatattatggggtggaggggggtggtatggagcaaggggcaagttggggtccttcaacgtcgaactgtagcactctggatagctagctagcgtttgtagatagtttcaaggatagcaaccaacaacacgatagtttagaaattgttctagatcttctgctactactcgagagatagttgacttctagaagactctggatagagagcttcctgtggtttctatttcaacacttcgagcgatttagatagaggcgtcaattgagaacaaaaactggacacctgtttctagaacactagtgctagtcttctcaaggcttgatacgtcctgccactcacacacaaaaaaccaacacacagattaatgaaaataaagatcttttattagagagcgagtggatagtttagagtcgcttgagacttatcctgtgtccaactagccaagagtagagagagagtgactaggtggatcgagagatcgtcgtctatttgactgctagcctgtgttctcgtcgtagtccaaatcttcaatactctggcgactagtaacttgaatctgtgtatctaacacgacaaggctactcctttgagtttctagtgataagtgcgactggatctagctagttgagtttctagaaactacgtccaaagctactagcacta

SEQ ID NO: 80 - DNA, 4280 bp, Artificial Sequence
  Description of Artificial Sequence: Synthetic polynucleotide
tcgagcttgggctgcaggtcgagggcactgggaggatgttgagtaagatggaaaactactgatgacccttgcagagacagagtattaggacatgtttgaacaggggccgggcgatcagcaggtagctctagaggatccccgtctgtctgcacatttcgtagagcgagtgttccgatactctaatctccctaggcaaggttcatatttgtgtaggttacttattctccttttgttgactaagtcaataatcagaatcagcaggtttggagtcagcttggcagggatcagcagcctgggttggaaggagggggtataaaagccccttcaccaggagaagccgtcacacagactagccctaaggtaagttggcgccgtttaagggatggttggttggtggggtattaatgtttaattaccttttttacaggcctgaactaggcgcgccaccgccaccatgctcaggggtccgggacccgggcggctgctgctgctagcagtcctgtgcctggggacatcggtgcgctgcaccgaaaccgggaagagcaagagggcttaccgccccagtgagaccctgtgcggcggggagctggtggacaccctccagttcgtctgtggggaccgcggcttctacttcagcaggcccgcaagccgtgtgagccgtcgcagccgtggcatcatggaggagtgctgtttccgcagctgtgacctggccctcctggagacgtactgtgctacccccgccaagtccgagggcgcgccggcacaccccggccgtcccagagcagtgcccacacagtgcgacgtcccccccaacagccgcttcgattgcgcccctgacaaggccatcacccaggaacagtgcgaggcccgcggctgctgctacatccctgcaaagcaggggctgcagggagcccagatggggcagccctggtgcttcttcccacccagctaccccagctacaagctggagaacctgagctcctctgaaatgggctacacggccaccctgacccgtaccacccccaccttcttccccaaggacatcctgaccctgcggctggacgtgatgatggagactgagaaccgcctccacttcacgatcaaagatccagctaacaggcgctacgaggtgcccttggagaccccgcgtgtccacagccgggcaccgtccccactctacagcgtggagttctccgaggagcccttcggggtgatcgtgcaccggcagctggacggccgcgtgctgctgaacacgacggtggcgcccctgttctttgcggaccagttccttcagctgtccacctcgctgccctcgcagtatatcacaggcctcgccgagcacctcagtcccctgatgctcagcaccagctggaccaggatcaccctgtggaaccgggaccttgcgcccacgcccggtgcgaacctctacgggtctcaccctttctacctggcgctggaggacggcgggtcggcacacggggtgttcctgctaaacagcaatgccatggatgtggtcctgcagccgagccctgcccttagctggaggtcgacaggtgggatcctggatgtctacatcttcctgggcccagagcccaagagcgtggtgcagcagtacctggacgttgtgggatacccgttcatgccgccatactggggcctgggcttccacctgtgccgctggggctactcctccaccgctatcacccgccaggtggtggagaacatgaccagggcccacttccccctggacgtccaatggaacgacctggactacatggactcccggagggacttcacgttcaacaaggatggcttccgggacttcccggccatggtgcaggagctgcaccagggcggccggcgctacatgatgatcgtggatcctgccatcagcagctcgggccctgccgggagctacaggccctacgacgagggtctgcggaggggggttttcatcaccaacgagaccggccagccgctgattgggaaggtatggcccgggtccactgccttccccgacttcaccaaccccacagccctggcctggtgggaggacatggtggctgagttccatgaccaggtgcccttcgacggcatgtggattgacatgaacgagccttccaacttcatcagaggctctgaggacggctgccccaacaatgagctggagaacccaccctacgtgcctggggtggttggggggaccctccaggcggccaccatctgtgcctccagccaccagtttctctccacacactacaacctgcacaacctctacggcctgaccgaagccatcgcctcccacagggcgctggtgaaggctcgggggacacgcccatttgtgatctcccgctcgacctttgctggccacggccgatacgccggccactggacgggggacgtgtggagctcctgggagcagctcgcctcctccgtgccagaaatcctgcagtttaacctgctgggggtgcctctggtcggggccgacgtctgcggcttcctgggcaacacctcagaggagctgtgtgtgcgctggacccagctgggggccttctaccccttcatgcggaaccacaacagcctgctcagtctgccccaggagccgtacagcttcagcgagccggcccagcaggccatgaggaaggccctcaccctgcgctacgcactcctcccccacctctacacactgttccaccaggcccacgtcgcgggggagaccgtggcccggcccctcttcctggagttccccaaggactctagcacctggactgtggaccaccagctcctgtggggggaggccctgctcatcaccccagtgctccaggccgggaaggccgaagtgactggctacttccccttgggcacatggtacgacctgcagacggtgccaatagaggcccttggcagcctcccacccccacctgcagctccccgtgagccagccatccacagcgaggggcagtgggtgacgctgccggcccccctggacaccatcaacgtccacctccgggctgggtacatcatccccctgcagggccctggcctcacaaccacagagtcccgccagcagcccatggccctggctgtggccctgaccaagggtggagaggcccgaggggagctgttctgggacgatggagagagcctggaagtgctggagcgaggggcctacacacaggtcatcttcctggccaggaataacacgatcgtgaatgagctggtacgtgtgaccagtgagggagctggcctgcagctgcagaaggtgactgtcctgggcgtggccacggcgccccagcaggtcctctccaacggtgtccctgtctccaacttcacctacagccccgacaccaaggtcctggacatctgtgtctcgctgttgatgggagagcagtttctcgtcagctggtgttagcgagcggccgctcttagtagcagtatcgatcccagcccacttttccccaatacgactacgagatctgtggcttctagctgcccgggtggcatccctgtgacccctccccagtgcctctcctggccctggaagttgccactccagtgcccaccagccttgtcctaataaaattaagttgcatcattttgtctgactaggtgtccttctataatattatggggtggaggggggtggtatggagcaaggggcaagttggggtccttcaacgtcgaactgtagcactctggatagctagctagcgtttgtagatagtttcaaggatagcaaccaacaacacgatagtttagaaattgttctagatcttctgctactactcgagagatagttgacttctagaagactctggatagagagcttcctgtggtttctatttcaacacttcgagcgatttagatagaggcgtcaattgagaacaaaaactggacacctgtttctagaacactagtgctagtcttctcaaggcttgatacgtcctgccactcacacacaaaaaaccaacacacagattaatgaaaataaagatcttttattagagagcgagtggatagtttagagtcgcttgagacttatcctgtgtccaactagccaagagtagagagagagtgactaggtggatcgagagatcgtcgtctatttgactgctagcctgtgttctcgtcgtagtccaaatcttcaatactctggcgactagtaacttgaatctgtgtatctaacacgacaaggctactcctttgagtttctagtgataagtgcgactggatctagctagttgagtttctagaaactacgtccaaagctactagcacta

SEQ ID NO: 81 - DNA, 4277 bp, Artificial Sequence
  Description of Artificial Sequence: Synthetic polynucleotide
tcgagcttgggctgcaggtcgagggcactgggaggatgttgagtaagatggaaaactactgatgacccttgcagagacagagtattaggacatgtttgaacaggggccgggcgatcagcaggtagctctagaggatccccgtctgtctgcacatttcgtagagcgagtgttccgatactctaatctccctaggcaaggttcatatttgtgtaggttacttattctccttttgttgactaagtcaataatcagaatcagcaggtttggagtcagcttggcagggatcagcagcctgggttggaaggagggggtataaaagccccttcaccaggagaagccgtcacacagactagccctaaggtaagttggcgccgtttaagggatggttggttggtggggtattaatgtttaattaccttttttacaggcctgaactaggcgcgccaccgccaccatgcttaggggtccggggcccgggctgctgctgctggccgtccagtgcctggggacagcggtgccctccacgggagcctcgaagagcaagagggcttaccgccccagtgagaccctgtgcggcggggagctggtggacaccctccagttcgtctgtggggaccgcggcttctacttcagcaggcccgcaagccgtgtgagccgtcgcagccgtggcatcatggaggagtgctgtttccgcagctgtgacctggccctcctggagacgtactgtgctacccccgccaagtccgagggcgcgccggcacaccccggccgtcccagagcagtgcccacacagtgcgacgtcccccccaacagccgcttcgattgcgcccctgacaaggccatcacccaggaacagtgcgaggcccgcggctgctgctacatccctgcaaagcaggggctgcagggagcccagatggggcagccctggtgcttcttcccacccagctaccccagctacaagctggagaacctgagctcctctgaaatgggctacacggccaccctgacccgtaccacccccaccttcttccccaaggacatcctgaccctgcggctggacgtgatgatggagactgagaaccgcctccacttcacgatcaaagatccagctaacaggcgctacgaggtgcccttggagaccccgcgtgtccacagccgggcaccgtccccactctacagcgtggagttctccgaggagcccttcggggtgatcgtgcaccggcagctggacggccgcgtgctgctgaacacgacggtggcgcccctgttctttgcggaccagttccttcagctgtccacctcgctgccctcgcagtatatcacaggcctcgccgagcacctcagtcccctgatgctcagcaccagctggaccaggatcaccctgtggaaccgggaccttgcgcccacgcccggtgcgaacctctacgggtctcaccctttctacctggcgctggaggacggcgggtcggcacacggggtgttcctgctaaacagcaatgccatggatgtggtcctgcagccgagccctgcccttagctggaggtcgacaggtgggatcctggatgtctacatcttcctgggcccagagcccaagagcgtggtgcagcagtacctggacgttgtgggatacccgttcatgccgccatactggggcctgggcttccacctgtgccgctggggctactcctccaccgctatcacccgccaggtggtggagaacatgaccagggcccacttccccctggacgtccaatggaacgacctggactacatggactcccggagggacttcacgttcaacaaggatggcttccgggacttcccggccatggtgcaggagctgcaccagggcggccggcgctacatgatgatcgtggatcctgccatcagcagctcgggccctgccgggagctacaggccctacgacgagggtctgcggaggggggttttcatcaccaacgagaccggccagccgctgattgggaaggtatggcccgggtccactgccttccccgacttcaccaaccccacagccctggcctggtgggaggacatggtggctgagttccatgaccaggtgcccttcgacggcatgtggattgacatgaacgagccttccaacttcatcagaggctctgaggacggctgccccaacaatgagctggagaacccaccctacgtgcctggggtggttggggggaccctccaggcggccaccatctgtgcctccagccaccagtttctctccacacactacaacctgcacaacctctacggcctgaccgaagccatcgcctcccacagggcgctggtgaaggctcgggggacacgcccatttgtgatctcccgctcgacctttgctggccacggccgatacgccggccactggacgggggacgtgtggagctcctgggagcagctcgcctcctccgtgccagaaatcctgcagtttaacctgctgggggtgcctctggtcggggccgacgtctgcggcttcctgggcaacacctcagaggagctgtgtgtgcgctggacccagctgggggccttctaccccttcatgcggaaccacaacagcctgctcagtctgccccaggagccgtacagcttcagcgagccggcccagcaggccatgaggaaggccctcaccctgcgctacgcactcctcccccacctctacacactgttccaccaggcccacgtcgcgggggagaccgtggcccggcccctcttcctggagttccccaaggactctagcacctggactgtggaccaccagctcctgtggggggaggccctgctcatcaccccagtgctccaggccgggaaggccgaagtgactggctacttccccttgggcacatggtacgacctgcagacggtgccaatagaggcccttggcagcctcccacccccacctgcagctccccgtgagccagccatccacagcgaggggcagtgggtgacgctgccggcccccctggacaccatcaacgtccacctccgggctgggtacatcatccccctgcagggccctggcctcacaaccacagagtcccgccagcagcccatggccctggctgtggccctgaccaagggtggagaggcccgaggggagctgttctgggacgatggagagagcctggaagtgctggagcgaggggcctacacacaggtcatcttcctggccaggaataacacgatcgtgaatgagctggtacgtgtgaccagtgagggagctggcctgcagctgcagaaggtgactgtcctgggcgtggccacggcgccccagcaggtcctctccaacggtgtccctgtctccaacttcacctacagccccgacaccaaggtcctggacatctgtgtctcgctgttgatgggagagcagtttctcgtcagctggtgttagcgagcggccgctcttagtagcagtatcgatcccagcccacttttccccaatacgactacgagatctgtggcttctagctgcccgggtggcatccctgtgacccctccccagtgcctctcctggccctggaagttgccactccagtgcccaccagccttgtcctaataaaattaagttgcatcattttgtctgactaggtgtccttctataatattatggggtggaggggggtggtatggagcaaggggcaagttggggtccttcaacgtcgaactgtagcactctggatagctagctagcgtttgtagatagtttcaaggatagcaaccaacaacacgatagtttagaaattgttctagatcttctgctactactcgagagatagttgacttctagaagactctggatagagagcttcctgtggtttctatttcaacacttcgagcgatttagatagaggcgtcaattgagaacaaaaactggacacctgtttctagaacactagtgctagtcttctcaaggcttgatacgtcctgccactcacacacaaaaaaccaacacacagattaatgaaaataaagatcttttattagagagcgagtggatagtttagagtcgcttgagacttatcctgtgtccaactagccaagagtagagagagagtgactaggtggatcgagagatcgtcgtctatttgactgctagcctgtgttctcgtcgtagtccaaatcttcaatactctggcgactagtaacttgaatctgtgtatctaacacgacaaggctactcctttgagtttctagtgataagtgcgactggatctagctagttgagtttctagaaactacgtccaaagctactagcacta

SEQ ID NO: 82 - DNA, 4238 bp, Artificial Sequence
  Description of Artificial Sequence: Synthetic polynucleotide
tcgagcttgggctgcaggtcgagggcactgggaggatgttgagtaagatggaaaactactgatgacccttgcagagacagagtattaggacatgtttgaacaggggccgggcgatcagcaggtagctctagaggatccccgtctgtctgcacatttcgtagagcgagtgttccgatactctaatctccctaggcaaggttcatatttgtgtaggttacttattctccttttgttgactaagtcaataatcagaatcagcaggtttggagtcagcttggcagggatcagcagcctgggttggaaggagggggtataaaagccccttcaccaggagaagccgtcacacagactagccctaaggtaagttggcgccgtttaagggatggttggttggtggggtattaatgtttaattaccttttttacaggcctgaactaggcgcgccaccgccaccatgccgtcttctgtctcgtggggcatcctcctgctggcaggcctgtgctgcctggtccctgtctccctggctgctctgtgcggcggggagctggtggacaccctccagttcgtctgtggggaccgcggcttctacttcagcaggcccgcaagccgtgtgagccgtcgcagccgtggcatcgttgaggagtgctgtttccgcagctgtgacctggccctcctggagacgtactgtgctacccccgccaagtccgagggcgcgccggcacaccccggccgtcccagagcagtgcccacacagtgcgacgtcccccccaacagccgcttcgattgcgcccctgacaaggccatcacccaggaacagtgcgaggcccgcggctgctgctacatccctgcaaagcaggggctgcagggagcccagatggggcagccctggtgcttcttcccacccagctaccccagctacaagctggagaacctgagctcctctgaaatgggctacacggccaccctgacccgtaccacccccaccttcttccccaaggacatcctgaccctgcggctggacgtgatgatggagactgagaaccgcctccacttcacgatcaaagatccagctaacaggcgctacgaggtgcccttggagaccccgcgtgtccacagccgggcaccgtccccactctacagcgtggagttctccgaggagcccttcggggtgatcgtgcaccggcagctggacggccgcgtgctgctgaacacgacggtggcgcccctgttctttgcggaccagttccttcagctgtccacctcgctgccctcgcagtatatcacaggcctcgccgagcacctcagtcccctgatgctcagcaccagctggaccaggatcaccctgtggaaccgggaccttgcgcccacgcccggtgcgaacctctacgggtctcaccctttctacctggcgctggaggacggcgggtcggcacacggggtgttcctgctaaacagcaatgccatggatgtggtcctgcagccgagccctgcccttagctggaggtcgacaggtgggatcctggatgtctacatcttcctgggcccagagcccaagagcgtggtgcagcagtacctggacgttgtgggatacccgttcatgccgccatactggggcctgggcttccacctgtgccgctggggctactcctccaccgctatcacccgccaggtggtggagaacatgaccagggcccacttccccctggacgtccaatggaacgacctggactacatggactcccggagggacttcacgttcaacaaggatggcttccgggacttcccggccatggtgcaggagctgcaccagggcggccggcgctacatgatgatcgtggatcctgccatcagcagctcgggccctgccgggagctacaggccctacgacgagggtctgcggaggggggttttcatcaccaacgagaccggccagccgctgattgggaaggtatggcccgggtccactgccttccccgacttcaccaaccccacagccctggcctggtgggaggacatggtggctgagttccatgaccaggtgcccttcgacggcatgtggattgacatgaacgagccttccaacttcatcagaggctctgaggacggctgccccaacaatgagctggagaacccaccctacgtgcctggggtggttggggggaccctccaggcggccaccatctgtgcctccagccaccagtttctctccacacactacaacctgcacaacctctacggcctgaccgaagccatcgcctcccacagggcgctggtgaaggctcgggggacacgcccatttgtgatctcccgctcgacctttgctggccacggccgatacgccggccactggacgggggacgtgtggagctcctgggagcagctcgcctcctccgtgccagaaatcctgcagtttaacctgctgggggtgcctctggtcggggccgacgtctgcggcttcctgggcaacacctcagaggagctgtgtgtgcgctggacccagctgggggccttctaccccttcatgcggaaccacaacagcctgctcagtctgccccaggagccgtacagcttcagcgagccggcccagcaggccatgaggaaggccctcaccctgcgctacgcactcctcccccacctctacacactgttccaccaggcccacgtcgcgggggagaccgtggcccggcccctcttcctggagttccccaaggactctagcacctggactgtggaccaccagctcctgtggggggaggccctgctcatcaccccagtgctccaggccgggaaggccgaagtgactggctacttccccttgggcacatggtacgacctgcagacggtgccaatagaggcccttggcagcctcccacccccacctgcagctccccgtgagccagccatccacagcgaggggcagtgggtgacgctgccggcccccctggacaccatcaacgtccacctccgggctgggtacatcatccccctgcagggccctggcctcacaaccacagagtcccgccagcagcccatggccctggctgtggccctgaccaagggtggagaggcccgaggggagctgttctgggacgatggagagagcctggaagtgctggagcgaggggcctacacacaggtcatcttcctggccaggaataacacgatcgtgaatgagctggtacgtgtgaccagtgagggagctggcctgcagctgcagaaggtgactgtcctgggcgtggccacggcgccccagcaggtcctctccaacggtgtccctgtctccaacttcacctacagccccgacaccaaggtcctggacatctgtgtctcgctgttgatgggagagcagtttctcgtcagctggtgttagcgagcggccgctcttagtagcagtatcgatcccagcccacttttccccaatacgactacgagatctgtggcttctagctgcccgggtggcatccctgtgacccctccccagtgcctctcctggccctggaagttgccactccagtgcccaccagccttgtcctaataaaattaagttgcatcattttgtctgactaggtgtccttctataatattatggggtggaggggggtggtatggagcaaggggcaagttggggtccttcaacgtcgaactgtagcactctggatagctagctagcgtttgtagatagtttcaaggatagcaaccaacaacacgatagtttagaaattgttctagatcttctgctactactcgagagatagttgacttctagaagactctggatagagagcttcctgtggtttctatttcaacacttcgagcgatttagatagaggcgtcaattgagaacaaaaactggacacctgtttctagaacactagtgctagtcttctcaaggcttgatacgtcctgccactcacacacaaaaaaccaacacacagattaatgaaaataaagatcttttattagagagcgagtggatagtttagagtcgcttgagacttatcctgtgtccaactagccaagagtagagagagagtgactaggtggatcgagagatcgtcgtctatttgactgctagcctgtgttctcgtcgtagtccaaatcttcaatactctggcgactagtaacttgaatctgtgtatctaacacgacaaggctactcctttgagtttctagtgataagtgcgactggatctagctagttgagtttctagaaactacgtccaaagctactagcacta

SEQ ID NO: 83 - DNA, 4262 bp, Artificial Sequence
  Description of Artificial Sequence: Synthetic polynucleotide
tcgagcttgggctgcaggtcgagggcactgggaggatgttgagtaagatggaaaactactgatgacccttgcagagacagagtattaggacatgtttgaacaggggccgggcgatcagcaggtagctctagaggatccccgtctgtctgcacatttcgtagagcgagtgttccgatactctaatctccctaggcaaggttcatatttgtgtaggttacttattctccttttgttgactaagtcaataatcagaatcagcaggtttggagtcagcttggcagggatcagcagcctgggttggaaggagggggtataaaagccccttcaccaggagaagccgtcacacagactagccctaaggtaagttggcgccgtttaagggatggttggttggtggggtattaatgtttaattaccttttttacaggcctgaactaggcgcgccaccgccaccatgctcaggggtccgggacccgggcggctgctgctgctagcagtcctgtgcctggggacatcggtgcgctgcaccgaaaccgggaagagcaagagggctctgtgcggcggggagctggtggacaccctccagttcgtctgtggggaccgcggcttctacttcagcaggcccgcaagccgtgtgagccgtcgcagccgtggcatcgttgaggagtgctgtttccgcagctgtgacctggccctcctggagacgtactgtgctacccccgccaagtccgagggcgcgccggcacaccccggccgtcccagagcagtgcccacacagtgcgacgtcccccccaacagccgcttcgattgcgcccctgacaaggccatcacccaggaacagtgcgaggcccgcggctgctgctacatccctgcaaagcaggggctgcagggagcccagatggggcagccctggtgcttcttcccacccagctaccccagctacaagctggagaacctgagctcctctgaaatgggctacacggccaccctgacccgtaccacccccaccttcttccccaaggacatcctgaccctgcggctggacgtgatgatggagactgagaaccgcctccacttcacgatcaaagatccagctaacaggcgctacgaggtgcccttggagaccccgcgtgtccacagccgggcaccgtccccactctacagcgtggagttctccgaggagcccttcggggtgatcgtgcaccggcagctggacggccgcgtgctgctgaacacgacggtggcgcccctgttctttgcggaccagttccttcagctgtccacctcgctgccctcgcagtatatcacaggcctcgccgagcacctcagtcccctgatgctcagcaccagctggaccaggatcaccctgtggaaccgggaccttgcgcccacgcccggtgcgaacctctacgggtctcaccctttctacctggcgctggaggacggcgggtcggcacacggggtgttcctgctaaacagcaatgccatggatgtggtcctgcagccgagccctgcccttagctggaggtcgacaggtgggatcctggatgtctacatcttcctgggcccagagcccaagagcgtggtgcagcagtacctggacgttgtgggatacccgttcatgccgccatactggggcctgggcttccacctgtgccgctggggctactcctccaccgctatcacccgccaggtggtggagaacatgaccagggcccacttccccctggacgtccaatggaacgacctggactacatggactcccggagggacttcacgttcaacaaggatggcttccgggacttcccggccatggtgcaggagctgcaccagggcggccggcgctacatgatgatcgtggatcctgccatcagcagctcgggccctgccgggagctacaggccctacgacgagggtctgcggaggggggttttcatcaccaacgagaccggccagccgctgattgggaaggtatggcccgggtccactgccttccccgacttcaccaaccccacagccctggcctggtgggaggacatggtggctgagttccatgaccaggtgcccttcgacggcatgtggattgacatgaacgagccttccaacttcatcagaggctctgaggacggctgccccaacaatgagctggagaacccaccctacgtgcctggggtggttggggggaccctccaggcggccaccatctgtgcctccagccaccagtttctctccacacactacaacctgcacaacctctacggcctgaccgaagccatcgcctcccacagggcgctggtgaaggctcgggggacacgcccatttgtgatctcccgctcgacctttgctggccacggccgatacgccggccactggacgggggacgtgtggagctcctgggagcagctcgcctcctccgtgccagaaatcctgcagtttaacctgctgggggtgcctctggtcggggccgacgtctgcggcttcctgggcaacacctcagaggagctgtgtgtgcgctggacccagctgggggccttctaccccttcatgcggaaccacaacagcctgctcagtctgccccaggagccgtacagcttcagcgagccggcccagcaggccatgaggaaggccctcaccctgcgctacgcactcctcccccacctctacacactgttccaccaggcccacgtcgcgggggagaccgtggcccggcccctcttcctggagttccccaaggactctagcacctggactgtggaccaccagctcctgtggggggaggccctgctcatcaccccagtgctccaggccgggaaggccgaagtgactggctacttccccttgggcacatggtacgacctgcagacggtgccaatagaggcccttggcagcctcccacccccacctgcagctccccgtgagccagccatccacagcgaggggcagtgggtgacgctgccggcccccctggacaccatcaacgtccacctccgggctgggtacatcatccccctgcagggccctggcctcacaaccacagagtcccgccagcagcccatggccctggctgtggccctgaccaagggtggagaggcccgaggggagctgttctgggacgatggagagagcctggaagtgctggagcgaggggcctacacacaggtcatcttcctggccaggaataacacgatcgtgaatgagctggtacgtgtgaccagtgagggagctggcctgcagctgcagaaggtgactgtcctgggcgtggccacggcgccccagcaggtcctctccaacggtgtccctgtctccaacttcacctacagccccgacaccaaggtcctggacatctgtgtctcgctgttgatgggagagcagtttctcgtcagctggtgttagcgagcggccgctcttagtagcagtatcgatcccagcccacttttccccaatacgactacgagatctgtggcttctagctgcccgggtggcatccctgtgacccctccccagtgcctctcctggccctggaagttgccactccagtgcccaccagccttgtcctaataaaattaagttgcatcattttgtctgactaggtgtccttctataatattatggggtggaggggggtggtatggagcaaggggcaagttggggtccttcaacgtcgaactgtagcactctggatagctagctagcgtttgtagatagtttcaaggatagcaaccaacaacacgatagtttagaaattgttctagatcttctgctactactcgagagatagttgacttctagaagactctggatagagagcttcctgtggtttctatttcaacacttcgagcgatttagatagaggcgtcaattgagaacaaaaactggacacctgtttctagaacactagtgctagtcttctcaaggcttgatacgtcctgccactcacacacaaaaaaccaacacacagattaatgaaaataaagatcttttattagagagcgagtggatagtttagagtcgcttgagacttatcctgtgtccaactagccaagagtagagagagagtgactaggtggatcgagagatcgtcgtctatttgactgctagcctgtgttctcgtcgtagtccaaatcttcaatactctggcgactagtaacttgaatctgtgtatctaacacgacaaggctactcctttgagtttctagtgataagtgcgactggatctagctagttgagtttctagaaactacgtccaaagctactagcacta

SEQ ID NO: 84 - DNA, 4259 bp, Artificial Sequence
  Description of Artificial Sequence: Synthetic polynucleotide
tcgagcttgggctgcaggtcgagggcactgggaggatgttgagtaagatggaaaactactgatgacccttgcagagacagagtattaggacatgtttgaacaggggccgggcgatcagcaggtagctctagaggatccccgtctgtctgcacatttcgtagagcgagtgttccgatactctaatctccctaggcaaggttcatatttgtgtaggttacttattctccttttgttgactaagtcaataatcagaatcagcaggtttggagtcagcttggcagggatcagcagcctgggttggaaggagggggtataaaagccccttcaccaggagaagccgtcacacagactagccctaaggtaagttggcgccgtttaagggatggttggttggtggggtattaatgtttaattaccttttttacaggcctgaactaggcgcgccaccgccaccatgcttaggggtccggggcccgggctgctgctgctggccgtccagtgcctggggacagcggtgccctccacgggagcctcgaagagcaagagggctctgtgcggcggggagctggtggacaccctccagttcgtctgtggggaccgcggcttctacttcagcaggcccgcaagccgtgtgagccgtcgcagccgtggcatcgttgaggagtgctgtttccgcagctgtgacctggccctcctggagacgtactgtgctacccccgccaagtccgagggcgcgccggcacaccccggccgtcccagagcagtgcccacacagtgcgacgtcccccccaacagccgcttcgattgcgcccctgacaaggccatcacccaggaacagtgcgaggcccgcggctgctgctacatccctgcaaagcaggggctgcagggagcccagatggggcagccctggtgcttcttcccacccagctaccccagctacaagctggagaacctgagctcctctgaaatgggctacacggccaccctgacccgtaccacccccaccttcttccccaaggacatcctgaccctgcggctggacgtgatgatggagactgagaaccgcctccacttcacgatcaaagatccagctaacaggcgctacgaggtgcccttggagaccccgcgtgtccacagccgggcaccgtccccactctacagcgtggagttctccgaggagcccttcggggtgatcgtgcaccggcagctggacggccgcgtgctgctgaacacgacggtggcgcccctgttctttgcggaccagttccttcagctgtccacctcgctgccctcgcagtatatcacaggcctcgccgagcacctcagtcccctgatgctcagcaccagctggaccaggatcaccctgtggaaccgggaccttgcgcccacgcccggtgcgaacctctacgggtctcaccctttctacctggcgctggaggacggcgggtcggcacacggggtgttcctgctaaacagcaatgccatggatgtggtcctgcagccgagccctgcccttagctggaggtcgacaggtgggatcctggatgtctacatcttcctgggcccagagcccaagagcgtggtgcagcagtacctggacgttgtgggatacccgttcatgccgccatactggggcctgggcttccacctgtgccgctggggctactcctccaccgctatcacccgccaggtggtggagaacatgaccagggcccacttccccctggacgtccaatggaacgacctggactacatggactcccggagggacttcacgttcaacaaggatggcttccgggacttcccggccatggtgcaggagctgcaccagggcggccggcgctacatgatgatcgtggatcctgccatcagcagctcgggccctgccgggagctacaggccctacgacgagggtctgcggaggggggttttcatcaccaacgagaccggccagccgctgattgggaaggtatggcccgggtccactgccttccccgacttcaccaaccccacagccctggcctggtgggaggacatggtggctgagttccatgaccaggtgcccttcgacggcatgtggattgacatgaacgagccttccaacttcatcagaggctctgaggacggctgccccaacaatgagctggagaacccaccctacgtgcctggggtggttggggggaccctccaggcggccaccatctgtgcctccagccaccagtttctctccacacactacaacctgcacaacctctacggcctgaccgaagccatcgcctcccacagggcgctggtgaaggctcgggggacacgcccatttgtgatctcccgctcgacctttgctggccacggccgatacgccggccactggacgggggacgtgtggagctcctgggagcagctcgcctcctccgtgccagaaatcctgcagtttaacctgctgggggtgcctctggtcggggccgacgtctgcggcttcctgggcaacacctcagaggagctgtgtgtgcgctggacccagctgggggccttctaccccttcatgcggaaccacaacagcctgctcagtctgccccaggagccgtacagcttcagcgagccggcccagcaggccatgaggaaggccctcaccctgcgctacgcactcctcccccacctctacacactgttccaccaggcccacgtcgcgggggagaccgtggcccggcccctcttcctggagttccccaaggactctagcacctggactgtggaccaccagctcctgtggggggaggccctgctcatcaccccagtgctccaggccgggaaggccgaagtgactggctacttccccttgggcacatggtacgacctgcagacggtgccaatagaggcccttggcagcctcccacccccacctgcagctccccgtgagccagccatccacagcgaggggcagtgggtgacgctgccggcccccctggacaccatcaacgtccacctccgggctgggtacatcatccccctgcagggccctggcctcacaaccacagagtcccgccagcagcccatggccctggctgtggccctgaccaagggtggagaggcccgaggggagctgttctgggacgatggagagagcctggaagtgctggagcgaggggcctacacacaggtcatcttcctggccaggaataacacgatcgtgaatgagctggtacgtgtgaccagtgagggagctggcctgcagctgcagaaggtgactgtcctgggcgtggccacggcgccccagcaggtcctctccaacggtgtccctgtctccaacttcacctacagccccgacaccaaggtcctggacatctgtgtctcgctgttgatgggagagcagtttctcgtcagctggtgttagcgagcggccgctcttagtagcagtatcgatcccagcccacttttccccaatacgactacgagatctgtggcttctagctgcccgggtggcatccctgtgacccctccccagtgcctctcctggccctggaagttgccactccagtgcccaccagccttgtcctaataaaattaagttgcatcattttgtctgactaggtgtccttctataatattatggggtggaggggggtggtatggagcaaggggcaagttggggtccttcaacgtcgaactgtagcactctggatagctagctagcgtttgtagatagtttcaaggatagcaaccaacaacacgatagtttagaaattgttctagatcttctgctactactcgagagatagttgacttctagaagactctggatagagagcttcctgtggtttctatttcaacacttcgagcgatttagatagaggcgtcaattgagaacaaaaactggacacctgtttctagaacactagtgctagtcttctcaaggcttgatacgtcctgccactcacacacaaaaaaccaacacacagattaatgaaaataaagatcttttattagagagcgagtggatagtttagagtcgcttgagacttatcctgtgtccaactagccaagagtagagagagagtgactaggtggatcgagagatcgtcgtctatttgactgctagcctgtgttctcgtcgtagtccaaatcttcaatactctggcgactagtaacttgaatctgtgtatctaacacgacaaggctactcctttgagtttctagtgataagtgcgactggatctagctagttgagtttctagaaactacgtccaaagctactagcacta

SEQ ID NO: 85 - DNA, 165 bp, Homo sapiens
ccgggcggagtgtgttagtctctccagagggaggctggttccccagggaagcagagcctgtgtgcgggcagcagctgtgtgcgggcctgggggttgttaagtgcaattatttttaataaaaggggcatttggaaaaaaaaaaaaaaggtagcagtcgacagatga

SEQ ID NO: 86 - DNA, 180 bp, Artificial Sequence
  Description of Artificial Sequence: Synthetic polynucleotide
aggttaatttttaaaaagcagtcaaaagtccaagtggcccttggcagcatttactctctctgtttgctctggttaataatctcaggagcacaaacattccccctgttcaaacatgtcctaatactctgtctctgcaagggtcatcagtagttttccatcttactcaacatcctcccagtg

SEQ ID NO: 87 - DNA, 402 bp, Artificial Sequence
  Description of Artificial Sequence: Synthetic polynucleotide
caggctttcactttctcgccaacttacaaggcctttctgtgtaaacaatacctgaacctttaccccgttgcccggcaacggccaggtctgtgccaagtgtttgaggttaatttttaaaaagcagtcaaaagtccaagtggcccttggcagcatttactctctctgtttgctctggttaataatctcaggagcacaaacattccggcccgggaggcgccctttggaccttttgcaatcctggcgcactgaacccttgacccctgccctgcagcccccgcagcttgctgtttgcccactctatttgcccagccccagccctggagagtcctttagcagggcaaagtgcaacataggcagaccttaagggatgactcagtaacagataagctttgtgtgcctgca

SEQ ID NO: 88 - DNA, 305 bp, Artificial Sequence
  Description of Artificial Sequence: Synthetic polynucleotide
aggttaatttttaaaaagcagtcaaaagtccaagtggcccttggcagcatttactctctctgtttgctctggttaataatctcaggagcacaaacattcctgtaccggcccgggaggcgccctttggaccttttgcaatcctggcgcactgaacccttgacccctgccctgcagcccccgcagcttgctgtttgcccactctatttgcccagccccagccctggagagtcctttagcagggcaaagtgcaacataggcagaccttaagggatgactcagtaacagataagctttgtgtgcctgca

SEQ ID NO: 89 - DNA, 103 bp, Artificial Sequence
  Description of Artificial Sequence: Synthetic polynucleotide
caggctttcactttctcgccaacttacaaggcctttctgtgtaaacaatacctgaacctttaccccgttgcccggcaacggccaggtctgtgccaagtgtttg

SEQ ID NO: 90 - DNA, 212 bp, Artificial Sequence
  Description of Artificial Sequence: Synthetic polynucleotide
aggttaatttttaaaaagcagtcaaaagtccaagtggcccttggcagcatttactctctctgtttgctctggttaataatctcaggagcacaaacattccggcccgggaggcgccctttggaccttttgcaatcctggcgcactgaacccttgacccctgccctgcagcccccgcagcttgctgtttgcccactctatttgcccagccccag

SEQ ID NO: 91 - DNA, 283 bp, Artificial Sequence
  Description of Artificial Sequence: Synthetic polynucleotide
aggttaatttttaaaaagcagtcaaaagtccaagtggcccttggcagcatttactctctctgtttgctctggttaataatctcaggagcacaaacattccccctgttcaaacatgtcctaatactctgtctctgcaagggtcatcagtagttttccatcttactcaacatcctcccagtgagtcatatgtttgctcactgaaggttactagttaacaggcatcccttaaacaggatataaaaggacttcagcaggactgctcgaaacatcccactcagccacc

SEQ ID NO: 92 - DNA, 565 bp, Artificial Sequence
  Description of Artificial Sequence: Synthetic polynucleotide
aggttaatttttaaaaagcagtcaaaagtccaagtggcccttggcagcatttactctctctgtttgctctggttaataatctcaggagcacaaacattccccctgttcaaacatgtcctaatactctgtctctgcaagggtcatcagtagttttccatcttactcaacatcctcccagtgagtcatatgtttgctcactgaaggttactagttaacaggcatcccttaaacaggatataaaaggacttcagcaggactgctcgaaacatcccacttcagatcgcctggagacgccatccacgctgttttgacctccatagaagacaccgggaccgatccagcctccgcggccgggaacggtgcattggaacgcggattccccgtgccaagagtgacgtaagtaccgcctatagactctataggcacacccctttggctcttatgcatgaacggtggagggcagtgtagtctgagcagtactcgttgctgccgcgcgcgccaccagacataatagctgacagactaacagactgttcctttccatgggtcttttctgcaggccacc

SEQ ID NO: 93 - DNA, 478 bp, Artificial Sequence
  Description of Artificial Sequence: Synthetic polynucleotide
caggctttcactttctcgccaacttacaaggcctttctgtgtaaacaatacctgaacctttaccccgttgcccggcaacggccaggtctgtgccaagtgtttgaggttaatttttaaaaagcagtcaaaagtccaagtggcccttggcagcatttactctctctgtttgctctggttaataatctcaggagcacaaacattccggcccgggaggcgccctttggaccttttgcaatcctggcgcactgaacccttgacccctgccctgcagcccccgcagcttgctgtttgcccactctatttgcccagccccagccctggagagtcctttagcagggcaaagtgcaacataggcagaccttaagggatgactcagtaacagataagctttgtgtgcctgcagggcatataaaacaggggcaaggcacagactcatagcagagcaatcaccaccaagcctggaataactgcagccacc

SEQ ID NO: 94 - DNA, 381 bp, Artificial Sequence
  Description of Artificial Sequence: Synthetic polynucleotide
aggttaatttttaaaaagcagtcaaaagtccaagtggcccttggcagcatttactctctctgtttgctctggttaataatctcaggagcacaaacattcctgtaccggcccgggaggcgccctttggaccttttgcaatcctggcgcactgaacccttgacccctgccctgcagcccccgcagcttgctgtttgcccactctatttgcccagccccagccctggagagtcctttagcagggcaaagtgcaacataggcagaccttaagggatgactcagtaacagataagctttgtgtgcctgcagggcatataaaacaggggcaaggcacagactcatagcagagcaatcaccaccaagcctggaataactgcagccacc

SEQ ID NO: 95 - DNA, 379 bp, Artificial Sequence
  Description of Artificial Sequence: Synthetic polynucleotide
caggctttcactttctcgccaacttacaaggcctttctgtgtaaacaatacctgaacctttaccccgttgcccggcaacggccaggtctgtgccaagtgtttgccgatgacctaatgattctgagcttggcaaaggtcttatctcccagctcgcccaggcccagtgttccaggaatgtgacctttgctgcagcagccgctggagggggcagaggggatgggctggaggttgagcaaacagagcagcagaaaaggcagttcctcttctccagtgccctccttccctgtctctgcctctccctcccttcctcaggcatcagagcggagacttcagggagaccagagcccagcttgccaggcactgagctagaagccctgcc

SEQ ID NO: 96 - DNA, 288 bp, Artificial Sequence
  Description of Artificial Sequence: Synthetic polynucleotide
aggttaatttttaaaaagcagtcaaaagtccaagtggcccttggcagcatttactctctctgtttgctctggttaataatctcaggagcacaaacattccggcccgggaggcgccctttggaccttttgcaatcctggcgcactgaacccttgacccctgccctgcagcccccgcagcttgctgtttgcccactctatttgcccagccccaggggcatataaaacaggggcaaggcacagactcatagcagagcaatcaccaccaagcctggaataactgcagccacc

SEQ ID NO: 97 - DNA, 100 bp, Artificial Sequence
  Description of Artificial Sequence: Synthetic polynucleotide
aggttaatttttaaaaagcagtcaaaagtccaagtggcccttggcagcatttactctctctgtttgctctggttaataatctcaggagcacaaacattcc

SEQ ID NO: 98 - DNA, 13 bp, Artificial Sequence
  Description of Artificial Sequence: Synthetic oligonucleotide
gttaatttttaaa

SEQ ID NO: 99 - DNA, 11 bp, Artificial Sequence
  Description of Artificial Sequence: Synthetic oligonucleotide
gtggcccttgg

SEQ ID NO: 100 - DNA, 7 bp, Artificial Sequence
  Description of Artificial Sequence: Synthetic oligonucleotide
tgtttgc

SEQ ID NO: 101 - DNA, 15 bp, Artificial Sequence
  Description of Artificial Sequence: Synthetic oligonucleotide
tggttaataatctca

SEQ ID NO: 102 - DNA, 7 bp, Artificial Sequence
  Description of Artificial Sequence: Synthetic oligonucleotide
acaaaca

SEQ ID NO: 103 - DNA, 124 bp, Artificial Sequence
  Description of Artificial Sequence: Synthetic polynucleotide
  modified_base (14)..(39): a, c, t, g, unknown or other
  misc_feature (14)..(39): This region may encompass 10 to 26 nucleotides
  modified_base (51)..(72): a, c, t, g, unknown or other
  misc_feature (51)..(72): This region may encompass 8 to 22 nucleotides
  modified_base (80)..(89): a, c, t, g, unknown or other
  misc_feature (80)..(89): This region may encompass 1 to 10 nucleotides
  modified_base (105)..(117): a, c, t, g, unknown or other
  misc_feature (105)..(117): This region may encompass 1 to 13 nucleotides
  See specification as filed for detailed description of substitutions and preferred embodiments
gttaatttttaaannnnnnnnnnnnnnnnnnnnnnnnnngtggcccttggnnnnnnnnnnnnnnnnnnnnnntgtttgcnnnnnnnnnntggttaataatctcannnnnnnnnnnnnacaaaca

SEQ ID NO: 104 - DNA, 80 bp, Artificial Sequence
  Description of Artificial Sequence: Synthetic oligonucleotide
ccctgttcaaacatgtcctaatactctgtctctgcaagggtcatcagtagttttccatcttactcaacatcctcccagtg

SEQ ID NO: 105 - DNA, 87 bp, Artificial Sequence
  Description of Artificial Sequence: Synthetic oligonucleotide
  modified_base (12)..(21): a, c, t, g, unknown or other
  misc_feature (12)..(21): This region may encompass 1 to 10 nucleotides
  modified_base (33)..(42): a, c, t, g, unknown or other
  misc_feature (33)..(42): This region may encompass 1 to 10 nucleotides
  modified_base (55)..(77): a, c, t, g, unknown or other
  misc_feature (55)..(77): This region may encompass 8 to 23 nucleotides
  See specification as filed for detailed description of substitutions and preferred embodiments
gttcaaacatgnnnnnnnnnnctaatactctgnnnnnnnnnntgcaagggtcatnnnnnnnnnnnnnnnnnnnnnnnttactcaaca

SEQ ID NO: 106 - DNA, 11 bp, Artificial Sequence
  Description of Artificial Sequence: Synthetic oligonucleotide
gttcaaacatg

SEQ ID NO: 107 - DNA, 11 bp, Artificial Sequence
  Description of Artificial Sequence: Synthetic oligonucleotide
ctaatactctg

SEQ ID NO: 108 - DNA, 12 bp, Artificial Sequence
  Description of Artificial Sequence: Synthetic oligonucleotide
tgcaagggtcat

SEQ ID NO: 109 - DNA, 10 bp, Artificial Sequence
  Description of Artificial Sequence: Synthetic oligonucleotide
ttactcaaca

SEQ ID NO: 110 - DNA, 95 bp, Artificial Sequence
  Description of Artificial Sequence: Synthetic oligonucleotide
agtcatatgtttgctcactgaaggttactagttaacaggcatcccttaaacaggatataaaaggacttcagcaggactgctcgaaacatcccact

SEQ ID NO: 111 - DNA, 13 bp, Artificial Sequence
  Description of Artificial Sequence: Synthetic oligonucleotide
gttactagttaac

SEQ ID NO: 112 - DNA, 15 bp, Artificial Sequence
  Description of Artificial Sequence: Synthetic oligonucleotide
gctcgaaacatccca

SEQ ID NO: 113 - DNA, 40 bp, Artificial Sequence
  Description of Artificial Sequence: Synthetic oligonucleotide
ggcccgggaggcgccctttggaccttttgcaatcctggcg

SEQ ID NO: 114 - DNA, 28 bp, Artificial Sequence
  Description of Artificial Sequence: Synthetic oligonucleotide
gcgccctttggaccttttgcaatcctgg

SEQ ID NO: 115 - DNA, 13 bp, Artificial Sequence
  Description of Artificial Sequence: Synthetic oligonucleotide
cgccctttggacc

SEQ ID NO: 116 - DNA, 18 bp, Artificial Sequence
  Description of Artificial Sequence: Synthetic oligonucleotide
gaccttttgcaatcctgg

SEQ ID NO: 117 - DNA, 72 bp, Artificial Sequence
  Description of Artificial Sequence: Synthetic oligonucleotide
cactgaacccttgacccctgccctgcagcccccgcagcttgctgtttgcccactctatttgcccagccccag

SEQ ID NO: 118 - DNA, 77 bp, Artificial Sequence
  Description of Artificial Sequence: Synthetic oligonucleotide
  modified_base (19)..(48): a, c, t, g, unknown or other
  misc_feature (19)..(48): This region may encompass 14 to 30 nucleotides
  modified_base (59)..(68): a, c, t, g, unknown or other
  misc_feature (59)..(68): This region may encompass 1 to 10 nucleotides
  See specification as filed for detailed description of substitutions and preferred embodiments
actgaacccttgacccctnnnnnnnnnnnnnnnnnnnnnnnnnnnnnnctgtttgcccnnnnnnnnnntatttgccc

SEQ ID NO: 119 - DNA, 23 bp, Artificial Sequence
  Description of Artificial Sequence: Synthetic oligonucleotide
actgaacccttgacccctgccct

SEQ ID NO: 120 - DNA, 10 bp, Artificial Sequence
  Description of Artificial Sequence: Synthetic oligonucleotide
ctgtttgccc

SEQ ID NO: 121 - DNA, 10 bp, Artificial Sequence
  Description of Artificial Sequence: Synthetic oligonucleotide
ctatttgccc

SEQ ID NO: 122 - DNA, 87 bp, Artificial Sequence
  Description of Artificial Sequence: Synthetic oligonucleotide
ccctggagagtcctttagcagggcaaagtgcaacataggcagaccttaagggatgactcagtaacagataagctttgtgtgcctgca

SEQ ID NO: 123 - DNA, 53 bp, Artificial Sequence
  Description of Artificial Sequence: Synthetic oligonucleotide
  modified_base (16)..(43): a, c, t, g, unknown or other
  misc_feature (16)..(43): This region may encompass 10 to 28 nucleotides
  See specification as filed for detailed description of substitutions and preferred embodiments
gcagggcaaagtgcannnnnnnnnnnnnnnnnnnnnnnnnnnngatgactcag

SEQ ID NO: 124 - DNA, 15 bp, Artificial Sequence
  Description of Artificial Sequence: Synthetic oligonucleotide
gcagggcaaagtgca

SEQ ID NO: 125 - DNA, 10 bp, Artificial Sequence
  Description of Artificial Sequence: Synthetic oligonucleotide
gatgactcag

SEQ ID NO: 126 - DNA, 76 bp, Artificial Sequence
  Description of Artificial Sequence: Synthetic oligonucleotide
gggcatataaaacaggggcaaggcacagactcatagcagagcaatcaccaccaagcctggaataactgcagccacc

SEQ ID NO: 127 - DNA, 103 bp, Artificial Sequence; identical to SEQ ID NO: 89
  Description of Artificial Sequence: Synthetic polynucleotide

SEQ ID NO: 128 - DNA, 129 bp, Artificial Sequence
  Description of Artificial Sequence: Synthetic polynucleotide
  modified_base (19)..(38): a, c, t, g, unknown or other
  misc_feature (19)..(38): This region may encompass 10 to 20 nucleotides
  modified_base (52)..(61): a, c, t, g, unknown or other
  misc_feature (52)..(61): This region may encompass 1 to 10 nucleotides
  modified_base (76)..(85): a, c, t, g, unknown or other
  misc_feature (76)..(85): This region may encompass 1 to 10 nucleotides
  modified_base (99)..(108): a, c, t, g, unknown or other
  misc_feature (99)..(108): This region may encompass 1 to 10 nucleotides
  See specification as filed for detailed description of substitutions and preferred embodiments
ctttcactttctcgccaannnnnnnnnnnnnnnnnnnntgtgtaaacaatannnnnnnnnnctgaacctttacccnnnnnnnnnngttgcccggcaacnnnnnnnnnncaggtctgtgccaagtgtttg

SEQ ID NO: 129 - DNA, 11 bp, Artificial Sequence
  Description of Artificial Sequence: Synthetic oligonucleotide
ctttcactttc

SEQ ID NO: 130 - DNA, 7 bp, Artificial Sequence
  Description of Artificial Sequence: Synthetic oligonucleotide
tcgccaa

SEQ ID NO: 131 - DNA, 10 bp, Artificial Sequence
  Description of Artificial Sequence: Synthetic oligonucleotide
tgtgtaaaca

SEQ ID NO: 132 - DNA, 11 bp, Artificial Sequence
  Description of Artificial Sequence: Synthetic oligonucleotide
tgtaaacaata

SEQ ID NO: 133 - DNA, 14 bp, Artificial Sequence
  Description of Artificial Sequence: Synthetic oligonucleotide
ctgaacctttaccc

SEQ ID NO: 134 - DNA, 13 bp, Artificial Sequence
  Description of Artificial Sequence: Synthetic oligonucleotide
gttgcccggcaac

SEQ ID NO: 135 - DNA, 15 bp, Artificial Sequence
  Description of Artificial Sequence: Synthetic oligonucleotide
caggtctgtgccaag

SEQ ID NO: 136 - DNA, 13 bp, Artificial Sequence
  Description of Artificial Sequence: Synthetic oligonucleotide
tgccaagtgtttg

SEQ ID NO: 137 - DNA, 276 bp, Artificial Sequence
  Description of Artificial Sequence: Synthetic polynucleotide
ccgatgacctaatgattctgagcttggcaaaggtcttatctcccagctcgcccaggcccagtgttccaggaatgtgacctttgctgcagcagccgctggagggggcagaggggatgggctggaggttgagcaaacagagcagcagaaaaggcagttcctcttctccagtgccctccttccctgtctctgcctctccctcccttcctcaggcatcagagcggagacttcagggagaccagagcccagcttgccaggcactgagctagaagccctgcc

SEQ ID NO: 138 - DNA, 13 bp, Artificial Sequence
  Description of Artificial Sequence: Synthetic oligonucleotide
tggcaaaggtctt

SEQ ID NO: 139 - DNA, 11 bp, Artificial Sequence
  Description of Artificial Sequence: Synthetic oligonucleotide
tgtgacctttg

SEQ ID NO: 140 - DNA, 13 bp, Artificial Sequence
  Description of Artificial Sequence: Synthetic oligonucleotide
gtgacctttgctg

SEQ ID NO: 141 - DNA, 14 bp, Artificial Sequence
  Description of Artificial Sequence: Synthetic oligonucleotide
aggttgagcaaaca

SEQ ID NO: 142 - DNA, 9 bp, Artificial Sequence
  Description of Artificial Sequence: Synthetic oligonucleotide
agcaaacag

SEQ ID NO: 143 - DNA, 31 bp, Artificial Sequence
  Description of Artificial Sequence: Synthetic oligonucleotide
ggagaggcagagacagggaaggagggcactg

SEQ ID NO: 144 - DNA, 275 bp, Artificial Sequence
  Description of Artificial Sequence: Synthetic polynucleotide
ggcccgggaggcgccctttggaccttttgcaatcctggcgcactgaacccttgacccctgccctgcagcccccgcagcttgctgtttgcccactctatttgcccagccccagccctggagagtcctttagcagggcaaagtgcaacataggcagaccttaagggatgactcagtaacagataagctttgtgtgcctgcagggcatataaaacaggggcaaggcacagactcatagcagagcaatcaccaccaagcctggaataactgcagccacc

SEQ ID NO: 145 - DNA, 284 bp, Artificial Sequence
  Description of Artificial Sequence: Synthetic polynucleotide
tcagatcgcctggagacgccatccacgctgttttgacctccatagaagacaccgggaccgatccagcctccgcggccgggaacggtgcattggaacgcggattccccgtgccaagagtgacgtaagtaccgcctatagactctataggcacacccctttggctcttatgcatgaacggtggagggcagtgtagtctgagcagtactcgttgctgccgcgcgcgccaccagacataatagctgacagactaacagactgttcctttccatgggtcttttctgcag

SEQ ID NO: 146 - DNA, 636 bp, Artificial Sequence
  Description of Artificial Sequence: Synthetic polynucleotide
aggttaatttttaaaaagcagtcaaaagtccaagtggcccttggcagcatttactctctctgtttgctctggttaataatctcaggagcacaaacattcctgtaccggcccgggaggcgccctttggaccttttgcaatcctggcgcactgaacccttgacccctgccctgcagcccccgcagcttgctgtttgcccactctatttgcccagccccagccctggagagtcctttagcagggcaaagtgcaacataggcagaccttaagggatgactcagtaacagataagctttgtgtgcctgcagggcatataaaacaggggcaaggcacagactcatagcagagtcagatcgcctggagacgccatccacgctgttttgacctccatagaagacaccgggaccgatccagcctccgcggccgggaacggtgcattggaacgcggattccccgtgccaagagtgacgtaagtaccgcctatagactctataggcacacccctttggctcttatgcatgaacggtggagggcagtgtagtctgagcagtactcgttgctgccgcgcgcgccaccagacataatagctgacagactaacagactgttcctttccatgggtcttttctgcaggccacc

SEQ ID NO: 147 - DNA, 733 bp, Artificial Sequence
  Description of Artificial Sequence: Synthetic polynucleotide
caggctttcactttctcgccaacttacaaggcctttctgtgtaaacaatacctgaacctttaccccgttgcccggcaacggccaggtctgtgccaagtgtttgaggttaatttttaaaaagcagtcaaaagtccaagtggcccttggcagcatttactctctctgtttgctctggttaataatctcaggagcacaaacattccggcccgggaggcgccctttggaccttttgcaatcctggcgcactgaacccttgacccctgccctgcagcccccgcagcttgctgtttgcccactctatttgcccagccccagccctggagagtcctttagcagggcaaagtgcaacataggcagaccttaagggatgactcagtaacagataagctttgtgtgcctgcagggcatataaaacaggggcaaggcacagactcatagcagagtcagatcgcctggagacgccatccacgctgttttgacctccatagaagacaccgggaccgatccagcctccgcggccgggaacggtgcattggaacgcggattccccgtgccaagagtgacgtaagtaccgcctatagactctataggcacacccctttggctcttatgcatgaacggtggagggcagtgtagtctgagcagtactcgttgctgccgcgcgcgccaccagacataatagctgacagactaacagactgttcctttccatgggtcttttctgcaggccacc

SEQ ID NO: 148 - DNA, 653 bp, Artificial Sequence
  Description of Artificial Sequence: Synthetic polynucleotide
caggctttcactttctcgccaacttacaaggcctttctgtgtaaacaatacctgaacctttaccccgttgcccggcaacggccaggtctgtgccaagtgtttgccgatgacctaatgattctgagcttggcaaaggtcttatctcccagctcgcccaggcccagtgttccaggaatgtgacctttgctgcagcagccgctggagggggcagaggggatgggctggaggttgagcaaacagagcagcagaaaaggcagttcctcttctccagtgccctccttccctgtctctgcctctccctcccttcctcaggcatcagagcggagacttcagggagaccagagcccagcttgccaggcactgtcagatcgcctggagacgccatccacgctgttttgacctccatagaagacaccgggaccgatccagcctccgcggccgggaacggtgcattggaacgcggattccccgtgccaagagtgacgtaagtaccgcctatagactctataggcacacccctttggctcttatgcatgaacggtggagggcagtgtagtctgagcagtactcgttgctgccgcgcgcgccaccagacataatagctgacagactaacagactgttcctttccatgggtcttttctgcaggccacc

SEQ ID NO: 149 - DNA, 543 bp, Artificial Sequence
  Description of Artificial Sequence: Synthetic polynucleotide
aggttaatttttaaaaagcagtcaaaagtccaagtggcccttggcagcatttactctctctgtttgctctggttaataatctcaggagcacaaacattccggcccgggaggcgccctttggaccttttgcaatcctggcgcactgaacccttgacccctgccctgcagcccccgcagcttgctgtttgcccactctatttgcccagccccaggggcatataaaacaggggcaaggcacagactcatagcagagtcagatcgcctggagacgccatccacgctgttttgacctccatagaagacaccgggaccgatccagcctccgcggccgggaacggtgcattggaacgcggattccccgtgccaagagtgacgtaagtaccgcctatagactctataggcacacccctttggctcttatgcatgaacggtggagggcagtgtagtctgagcagtactcgttgctgccgcgcgcgccaccagacataatagctgacagactaacagactgttcctttccatgggtcttttctgcaggccacc

SEQ ID NO: 150 - DNA, 530 bp, Artificial Sequence
  Description of Artificial Sequence: Synthetic polynucleotide
ggcccgggaggcgccctttggaccttttgcaatcctggcgcactgaacccttgacccctgccctgcagcccccgcagcttgctgtttgcccactctatttgcccagccccagccctggagagtcctttagcagggcaaagtgcaacataggcagaccttaagggatgactcagtaacagataagctttgtgtgcctgcagggcatataaaacaggggcaaggcacagactcatagcagagtcagatcgcctggagacgccatccacgctgttttgacctccatagaagacaccgggaccgatccagcctccgcggccgggaacggtgcattggaacgcggattccccgtgccaagagtgacgtaagtaccgcctatagactctataggcacacccctttggctcttatgcatgaacggtggagggcagtgtagtctgagcagtactcgttgctgccgcgcgcgccaccagacataatagctgacagactaacagactgttcctttccatgggtcttttctgcaggccacc

SEQ ID NO: 151 - DNA, 103 bp, Artificial Sequence; identical to SEQ ID NO: 89
  Description of Artificial Sequence: Synthetic polynucleotide

SEQ ID NO: 152 - DNA, 80 bp, Artificial Sequence; identical to SEQ ID NO: 104
  Description of Artificial Sequence: Synthetic oligonucleotide

SEQ ID NO: 153 - DNA, 6 bp, Artificial Sequence
  Description of Artificial Sequence: Synthetic oligonucleotide
gccacc

SEQ ID NO: 154 - DNA, 6557 bp, Artificial Sequence
  Description of Artificial Sequence: Synthetic polynucleotide
gccattcgccattcaggctgcgcaactgttgggaagggcgatcggtgcgggcctcttcgctattacgccagctggcgaaagggggatgtgctgcaaggcgattaagttgggtaacgccagggttttcccagtcacgacgttgtaaaacgacggccagtgaattcctcgagatttaaatgacgttggccactccctctctgcgcgctcgctcgctcactgaggccgggcgaccaaaggtcgcccgacgcccgggctttgcccgggcggcctcagtgagcgagcgagcgcgcagagagggagtggccaactccatcactaggggttcctgagtttaaacttcgtcgaggccgcacgcgtaggttaatttttaaaaagcagtcaaaagtccaagtggcccttggcagcatttactctctctgtttgctctggttaataatctcaggagcacaaacattccccctgttcaaacatgtcctaatactctgtctctgcaagggtcatcagtagttttccatcttactcaacatcctcccagtgagtcatatgtttgctcactgaaggttactagttaacaggcatcccttaaacaggatataaaaggacttcagcaggactgctcgaaacatcccactcagccaccatgggagtgaggcacccgccctgctcccaccggctcctggccgtctgcgccctcgtgtccttggcaaccgctgcactcctggggcacatcctactccatgatttcctgctggttccccgagagctgagtggctcctccccagtcctggaggagactcacccagctcaccagcagggagccagcagaccagggccccgggatgcccaggcacaccccggccgtcccagagcagtgcccacacagtgcgacgtcccccccaacagccgcttcgattgcgcccctgacaaggccatcacccaggaacagtgcgaggcccgcggctgctgctacatccctgcaaagcaggggctgcagggagcccagatggggcagccctggtgcttcttcccacccagctaccccagctacaagctggagaacctgagctcctctgaaatgggctacacggccaccctgacccgtaccacccccaccttcttccccaaggacatcctgaccctgcggctggacgtgatgatggagactgagaaccgcctccacttcacgatcaaagatccagctaacaggcgctacgaggtgcccttggagaccccgcgtgtccacagccgggcaccgtccccactctacagcgtggagttctccgaggagcccttcggggtgatcgtgcaccggcagctggacggccgcgtgctgctgaacacgacggtggcgcccctgttctttgcggaccagttccttcagctgtccacctcgctgccctcgcagtatatcacaggcctcgccgagcacctcagtcccctgatgctcagcaccagctggaccaggatcaccctgtggaaccgggaccttgcgcccacgcccggtgcgaacctctacgggtctcaccctttctacctggcgctggaggacggcgggtcggcacacggggtgttcctgctaaacagcaatgccatggatgtggtcctgcagccgagccctgcccttagctggaggtcgacaggtgggatcctggatgtctacatcttcctgggcccagagcccaagagcgtggtgcagcagtacctggacgttgtgggatacccgttcatgccgccatactggggcctgggcttccacctgtgccgctggggctactcctccaccgctatcacccgccaggtggtggagaacatgaccagggcccacttccccctggacgtccaatggaacgacctggactacatggactcccggagggacttcacgttcaacaaggatggcttccgggacttcccggccatggtgcaggagctgcaccagggcggccggcgctacatgatgatcgtggatcctgccatcagcagctcgggccctgccgggagctacaggccctacgacgagggtctgcggaggggggttttcatcaccaacgagaccggccagccgctgattgggaaggtatggcccgggtccactgccttccccgacttcaccaaccccacagccctggcctggtgggaggacatggtggctgagttccatgaccaggtgcccttcgacggcatgtggattgacatgaacgagccttccaacttcatcagaggctctgaggacggctgccccaacaatgagctggagaacccaccctacgtgcctggggtggttggggggaccctccaggcggccaccatctgtgcctccagccaccagtttctctccacacactacaacctgcacaacctctacggcctgaccgaagccatcgcctcccacagggcgctggtgaaggctcgggggacacgcccatttgtgatctcccgctcgacctttgctggccacggccgatacgccggccactggacgggggacgtgtggagctcctgggagcagctcgcctcctccgtgccagaaatcctgcagtttaacctgctgggggtgcctctggtcggggccgacgtctgcggcttcctgggcaacacctcagaggagctgtgtgtgcgctggacccagctgggggccttctaccccttcatgcggaaccacaacagcctgctcagtctgccccaggagccgtacagcttcagcgagccggcccagcaggccatgaggaaggccctcaccctgcgctacgcactcctcccccacctctacacactgttccaccaggcccacgtcgcgggggagaccgtggcccggcccctcttcctggagttccccaaggactctagcacctggactgtggaccaccagctcctgtggggggaggccctgctcatcaccccagtgctccaggccgggaaggccgaagtgactggctacttccccttgggcacatggtacgacctgcagacggtgccaatagaggcccttggcagcctcccacccccacctgcagctccccgtgagccagccatccacagcgaggggcagtgggtgacgctgccggcccccctggacaccatcaacgtccacctccgggctgggtacatcatccccctgcagggccctggcctcacaaccacagagtcccgccagcagcccatggccctggctgtggccctgaccaagggtggagaggcccgaggggagctgttctgggacgatggagagagcctggaagtgctggagcgaggggcctacacacaggtcatcttcctggccaggaataacacgatcgtgaatgagctggtacgtgtgaccagtgagggagctggcctgcagctgcagaaggtgactgtcctgggcgtggccacggcgccccagcaggtcctctccaacggtgtccctgtctccaacttcacctacagccccgacaccaaggtcctggacatctgtgtctcgctgttgatgggagagcagtttctcgtcagctggtgttagccgggcggagtgtgttagtctctccagagggaggctggttccccagggaagcagagcctgtgtgcgggcagcagctgtgtgcgggcctgggggttgttaagtgcaattatttttaataaaaggggcatttggaaaaaaaaaaaaaaggtagcagtcgacagatgaattctgcagatctgtggcttctagctgcccgggtggcatccctgtgacccctccccagtgcctctcctggccctggaagttgccactccagtgcccaccagccttgtcctaataaaattaagttgcatcattttgtctgactaggtgtccttctataatattatggggtggaggggggtggtatggagcaaggggcaagttgggaagacaacctgagttgttgggattccaggcatcgagtagataagtagcatggcgggttaatcattaactacacacgtgcggaccgagcggcctaagctcgcgaaggaacccctagtgatggagttggccactccctctctgcgcgctcgctcgctcactgaggccgggcgaccaaaggtcgcccgacgcccgggctttgcccgggcggcctcagtgagcgagcgagcgcgcagagagggagtggccaagacgatttaaatgacaagcttggcgtaatcatggtcatagctgtttcctgtgtgaaattgttatccgctcacaattccacacaacatacgagccggaagcataaagtgtaaagcctggggtgcctaatgagtgagctaactcacattaattgcgttgcgctcactgcccgctttccagtcgggaaacctgtcgtgccagctgcattaatgaatcggccaacgcgcggggagaggcggtttgcgtattgggcgctcttccgcttcctcgctcactgactcgctgcgctcggtcgttcggctgcggcgagcggtatcagctcactcaaaggcggtaatacggttatccacagaatcaggggataacgcaggaaagaacatgtgagcaaaaggccagcaaaaggccaggaaccgtaaaaaggccgcgttgctggcgtttttccataggctccgcccccctgacgagcatcacaaaaatcgacgctcaagtcagaggtggcgaaacccgacaggactataaagataccaggcgtttccccctggaagctccctcgtgcgctctcctgttccgaccctgccgcttaccggatacctgtccgcctttctcccttcgggaagcgtggcgctttctcatagctcacgctgtaggtatctcagttcggtgtaggtcgttcgctccaagctgggctgtgtgcacgaaccccccgttcagcccgaccgctgcgccttatccggtaactatcgtcttgagtccaacccggtaagacacgacttatcgccactggcagcagccactggtaacaggattagcagagcgaggtatgtaggcggtgctacagagttcttgaagtggtggcctaactacggctacactagaagaacagtatttggtatctgcgctctgctgaagccagttaccttcggaaaaagagttggtagctcttgatccggcaaacaaaccaccgctggtagcggtggtttttttgtttgcaagcagcagattacgcgcagaaaaaaaggatctcaagaagatcctttgatcttttctacggggtctgacgctcagtggaacgaaaactcacgttaagggattttggtcatgagattatcaaaaaggatcttcacctagatccttttaaattaaaaatgaagttttaaatcaatctaaagtatatatgagtaaacttggtctgacagttagaaaaactcatcgagcatcaaatgaaactgcaatttattcatatcaggattatcaataccatatttttgaaaaagccgtttctgtaatgaaggagaaaactcaccgaggcagttccataggatggcaagatcctggtatcggtctgcgattccgactcgtccaacatcaatacaacctattaatttcccctcgtcaaaaataaggttatcaagtgagaaatcaccatgagtgacgactgaatccggtgagaatggcaaaagtttatgcatttctttccagacttgttcaacaggccagccattacgctcgtcatcaaaatcactcgcatcaaccaaaccgttattcattcgtgattgcgcctgagcgagacgaaatacgcgatcgctgttaaaaggacaattacaaacaggaatcgaatgcaaccggcgcaggaacactgccagcgcatcaacaatattttcacctgaatcaggatattcttctaatacctggaatgctgtttttccggggatcgcagtggtgagtaaccatgcatcatcaggagtacggataaaatgcttgatggtcggaagaggcataaattccgtcagccagtttagtctgaccatctcatctgtaacatcattggcaacgctacctttgccatgtttcagaaacaactctggcgcatcgggcttcccatacaagcgatagattgtcgcacctgattgcccgacattatcgcgagcccatttatacccatataaatcagcatccatgttggaatttaatcgcggcctcgacgtttcccgttgaatatggctcatactcttcctttttcaatattattgaagcatttatcagggttattgtctcatgagcggatacatatttgaatgtatttagaaaaataaacaaataggggttccgcgcacatttccccgaaaagtgccacctgacgtctaagaaaccattattatcatgacattaacctataaaaataggcgtatcacgaggccctttcgtctcgcgcgtttcggtgatgacggtgaaaacctctgacacatgcagctcccggagacggtcacagcttgtctgtaagcggatgccgggagcagacaagcccgtcagggcgcgtcagcgggtgttggcgggtgtcggggctggcttaactatgcggcatcagagcagattgtactgagagtgcaccatatgcggtgtgaaataccgcacagatgcgtaaggagaaaataccgcatcaggc

SEQ ID NO: 155 - DNA, 6694 bp, Artificial Sequence
  Description of Artificial Sequence: Synthetic polynucleotide
gccattcgccattcaggctgcgcaactgttgggaagggcgatcggtgcgggcctcttcgctattacgccagctggcgaaagggggatgtgctgcaaggcgattaagttgggtaacgccagggttttcccagtcacgacgttgtaaaacgacggccagtgaattcctcgagatttaaatgacgttggccactccctctctgcgcgctcgctcgctcactgaggccgggcgaccaaaggtcgcccgacgcccgggctttgcccgggcggcctcagtgagcgagcgagcgcgcagagagggagtggccaactccatcactaggggttcctgagtttaaacttcgtcgaggccgcacgcgtcgagcttgggctgcaggtcgagggcactgggaggatgttgagtaagatggaaaactactgatgacccttgcagagacagagtattaggacatgtttgaacaggggccgggcgatcagcaggtagctctagaggatccccgtctgtctgcacatttcgtagagcgagtgttccgatactctaatctccctaggcaaggttcatatttgtgtaggttacttattctccttttgttgactaagtcaataatcagaatcagcaggtttggagtcagcttggcagggatcagcagcctgggttggaaggagggggtataaaagccccttcaccaggagaagccgtcacacagaggtaccgagctcggatccactagtaacggccgccagtgtgctggaattcggctttccaggccatctccaaccatgggagtgaggcacccgccctgctcccaccggctcctggccgtctgcgccctcgtgtccttggcaaccgctgcactcctggggcacatcctactccatgatttcctgctggttccccgagagctgagtggctcctccccagtcctggaggagactcacccagctcaccagcagggagccagcagaccagggccccgggatgcccaggcacaccccggccgtcccagagcagtgcccacacagtgcgacgtcccccccaacagccgcttcgattgcgcccctgacaaggccatcacccaggaacagtgcgaggcccgcggctgctgctacatccctgcaaagcaggggctgcagggagcccagatggggcagccctggtgcttcttcccacccagctaccccagctacaagctggagaacctgagctcctctgaaatgggctacacggccaccctgacccgtaccacccccaccttcttccccaaggacatcctgaccctgcggctggacgtgatgatggagactgagaaccgcctccacttcacgatcaaagatccagctaacaggcgctacgaggtgcccttggagaccccgcgtgtccacagccgggcaccgtccccactctacagcgtggagttctccgaggagcccttcggggtgatcgtgcaccggcagctggacggccgcgtgctgctgaacacgacggtggcgcccctgttctttgcggaccagttccttcagctgtccacctcgctgccctcgcagtatatcacaggcctcgccgagcacctcagtcccctgatgctcagcaccagctggaccaggatcaccctgtggaaccgggaccttgcgcccacgcccggtgcgaacctctacgggtctcaccctttctacctggcgctggaggacggcgggtcggcacacggggtgttcctgctaaacagcaatgccatggatgtggtcctgcagccgagccctgcccttagctggaggtcgacaggtgggatcctggatgtctacatcttcctgggcccagagcccaagagcgtggtgcagcagtacctggacgttgtgggatacccgttcatgccgccatactggggcctgggcttccacctgtgccgctggggctactcctccaccgctatcacccgccaggtggtggagaacatgaccagggcccacttccccctggacgtccaatggaacgacctggactacatggactcccggagggacttcacgttcaacaaggatggcttccgggacttcccggccatggtgcaggagctgcaccagggcggccggcgctacatgatgatcgtggatcctgccatcagcagctcgggccctgccgggagctacaggccctacgacgagggtctgcggaggggggttttcatcaccaacgagaccggccagccgctgattgggaaggtatggcccgggtccactgccttccccgacttcaccaaccccacagccctggcctggtgggaggacatggtggctgagttccatgaccaggtgcccttcgacggcatgtggattgacatgaacgagccttccaacttcatcagaggctctgaggacggctgccccaacaatgagctggagaacccaccctacgtgcctggggtggttggggggaccctccaggcggccaccatctgtgcctccagccaccagtttctctccacacactacaacctgcacaacctctacggcctgaccgaagccatcgcctcccacagggcgctggtgaaggctcgggggacacgcccatttgtgatctcccgctcgacctttgctggccacggccgatacgccggccactggacgggggacgtgtggagctcctgggagcagctcgcctcctccgtgccagaaatcctgcagtttaacctgctgggggtgcctctggtcggggccgacgtctgcggcttcctgggcaacacctcagaggagctgtgtgtgcgctggacccagctgggggccttctaccccttcatgcggaaccacaacagcctgctcagtctgccccaggagccgtacagcttcagcgagccggcccagcaggccatgaggaaggccctcaccctgcgctacgcactcctcccccacctctacacactgttccaccaggcccacgtcgcgggggagaccgtggcccggcccctcttcctggagttccccaaggactctagcacctggactgtggaccaccagctcctgtggggggaggccctgctcatcaccccagtgctccaggccgggaaggccgaagtgactggctacttccccttgggcacatggtacgacctgcagacggtgccaatagaggcccttggcagcctcccacccccacctgcagctccccgtgagccagccatccacagcgaggggcagtgggtgacgctgccggcccccctggacaccatcaacgtccacctccgggctgggtacatcatccccctgcagggccctggcctcacaaccacagagtcccgccagcagcccatggccctggctgtggccctgaccaagggtggagaggcccgaggggagctgttctgggacgatggagagagcctggaagtgctggagcgaggggcctacacacaggtcatcttcctggccaggaataacacgatcgtgaatgagctggtacgtgtgaccagtgagggagctggcctgcagctgcagaaggtgactgtcctgggcgtggccacggcgccccagcaggtcctctccaacggtgtccctgtctccaacttcacctacagccccgacaccaaggtcctggacatctgtgtctcgctgttgatgggagagcagtttctcgtcagctggtgttagccgggcggagtgtgttagtctctccagagggaggctggttccccagggaagcagagcctgtgtgcgggcagcagctgtgtgcgggcctgggggttgttaagtgcaattatttttaataaaaggggcatttggaaaaaaaaaaaaaaggtagcagtcgacagatgaattctgcagatctgtggcttctagctgcccgggtggcatccctgtgacccctccccagtgcctctcctggccctggaagttgccactccagtgcccaccagccttgtcctaataaaattaagttgcatcattttgtctgactaggtgtccttctataatattatggggtggaggggggtggtatggagcaaggggcaagttgggaagacaacctgagttgttgggattccaggcatcgagtagataagtagcatggcgggttaatcattaactacacacgtgcggaccgagcggcctaagctcgcgaaggaacccctagtgatggagttggccactccctctctgcgcgctcgctcgctcactgaggccgggcgaccaaaggtcgcccgacgcccgggctttgcccgggcggcctcagtgagcgagcgagcgcgcagagagggagtggccaagacgatttaaatgacaagcttggcgtaatcatggtcatagctgtttcctgtgtgaaattgttatccgctcacaattccacacaacatacgagccggaagcataaagtgtaaagcctggggtgcctaatgagtgagctaactcacattaattgcgttgcgctcactgcccgctttccagtcgggaaacctgtcgtgccagctgcattaatgaatcggccaacgcgcggggagaggcggtttgcgtattgggcgctcttccgcttcctcgctcactgactcgctgcgctcggtcgttcggctgcggcgagcggtatcagctcactcaaaggcggtaatacggttatccacagaatcaggggataacgcaggaaagaacatgtgagcaaaaggccagcaaaaggccaggaaccgtaaaaaggccgcgttgctggcgtttttccataggctccgcccccctgacgagcatcacaaaaatcgacgctcaagtcagaggtggcgaaacccgacaggactataaagataccaggcgtttccccctggaagctccctcgtgcgctctcctgttccgaccctgccgcttaccggatacctgtccgcctttctcccttcgggaagcgtggcgctttctcatagctcacgctgtaggtatctcagttcggtgtaggtcgttcgctccaagctgggctgtgtgcacgaaccccccgttcagcccgaccgctgcgccttatccggtaactatcgtcttgagtccaacccggtaagacacgacttatcgccactggcagcagccactggtaacaggattagcagagcgaggtatgtaggcggtgctacagagttcttgaagtggtggcctaactacggctacactagaagaacagtatttggtatctgcgctctgctgaagccagttaccttcggaaaaagagttggtagctcttgatccggcaaacaaaccaccgctggtagcggtggtttttttgtttgcaagcagcagattacgcgcagaaaaaaaggatctcaagaagatcctttgatcttttctacggggtctgacgctcagtggaacgaaaactcacgttaagggattttggtcatgagattatcaaaaaggatcttcacctagatccttttaaattaaaaatgaagttttaaatcaatctaaagtatatatgagtaaacttggtctgacagttagaaaaactcatcgagcatcaaatgaaactgcaatttattcatatcaggattatcaataccatatttttgaaaaagccgtttctgtaatgaaggagaaaactcaccgaggcagttccataggatggcaagatcctggtatcggtctgcgattccgactcgtccaacatcaatacaacctattaatttcccctcgtcaaaaataaggttatcaagtgagaaatcaccatgagtgacgactgaatccggtgagaatggcaaaagtttatgcatttctttccagacttgttcaacaggccagccattacgctcgtcatcaaaatcactcgcatcaaccaaaccgttattcattcgtgattgcgcctgagcgagacgaaatacgcgatcgctgttaaaaggacaattacaaacaggaatcgaatgcaaccggcgcaggaacactgccagcgcatcaacaatattttcacctgaatcaggatattcttctaatacctggaatgctgtttttccggggatcgcagtggtgagtaaccatgcatcatcaggagtacggataaaatgcttgatggtcggaagaggcataaattccgtcagccagtttagtctgaccatctcatctgtaacatcattggcaacgctacctttgccatgtttcagaaacaactctggcgcatcgggcttcccatacaagcgatagattgtcgcacctgattgcccgacattatcgcgagcccatttatacccatataaatcagcatccatgttggaatttaatcgcggcctcgacgtttcccgttgaatatggctcatactcttcctttttcaatattattgaagcatttatcagggttattgtctcatgagcggatacatatttgaatgtatttagaaaaataaacaaataggggttccgcgcacatttccccgaaaagtgccacctgacgtctaagaaaccattattatcatgacattaacctataaaaataggcgtatcacgaggccctttcgtctcgcgcgtttcggtgatgacggtgaaaacctctgacacatgcagctcccggagacggtcacagcttgtctgtaagcggatgccgggagcagacaagcccgtcagggcgcgtcagcgggtgttggcgggtgtcggggctggcttaactatgcggcatcagagcagattgtactgagagtgcaccatatgcggtgtgaaataccgcacagatgcgtaaggagaaaataccgcatcaggc

SEQ ID NO: 156 - DNA, 6984 bp, Artificial Sequence
  Description of Artificial Sequence: Synthetic polynucleotide
gccattcgccattcaggctgcgcaactgttgggaagggcgatcggtgcgggcctcttcgctattacgccagctggcgaaagggggatgtgctgcaaggcgattaagttgggtaacgccagggttttcccagtcacgacgttgtaaaacgacggccagtgaattcctcgagatttaaatgacgttggccactccctctctgcgcgctcgctcgctcactgaggccgggcgaccaaaggtcgcccgacgcccgggctttgcccgggcggcctcagtgagcgagcgagcgcgcagagagggagtggccaactccatcactaggggttcctgagtttaaacttcgtcgaggccgcacgcgtaggttaatttttaaaaagcagtcaaaagtccaagtggcccttggcagcatttactctctctgtttgctctggttaataatctcaggagcacaaacattccccctgttcaaacatgtcctaatactctgtctctgcaagggtcatcagtagttttccatcttactcaacatcctcccagtgagtcatatgtttgctcactgaaggttactagttaacaggcatcccttaaacaggatataaaaggacttcagcaggactgctcgaaacatcccactcagccaccatgggagtgaggcacccgccctgctcccaccggctcctggccgtctgcgccctcgtgtccttggcaaccgctgcactcctggggcacatcctactccatgatttcctgctggttccccgagagctgagtggctcctccccagtcctggaggagactcacccagctcaccagcagggagccagcagaccagggccccgggatgcccaggcacaccccggccgtcccagagcagtgcccacacagtgcgacgtcccccccaacagccgcttcgattgcgcccctgacaaggccatcacccaggaacagtgcgaggcccgcggctgctgctacatccctgcaaagcaggggctgcagggagcccagatggggcagccctggtgcttcttcccacccagctaccccagctacaagctggagaacctgagctcctctgaaatgggctacacggccaccctgacccgtaccacccccaccttcttccccaaggacatcctgaccctgcggctggacgtgatgatggagactgagaaccgcctccacttcacgatcaaagatccagctaacaggcgctacgaggtgcccttggagaccccgcgtgtccacagccgggcaccgtccccactctacagcgtggagttctccgaggagcccttcggggtgatcgtgcaccggcagctggacggccgcgtgctgctgaacacgacggtggcgcccctgttctttgcggaccagttccttcagctgtccacctcgctgccctcgcagtatatcacaggcctcgccgagcacctcagtcccctgatgctcagcaccagctggaccaggatcaccctgtggaaccgggaccttgcgcccacgcccggtgcgaacctctacgggtctcaccctttctacctggcgctggaggacggcgggtcggcacacggggtgttcctgctaaacagcaatgccatggatgtggtcctgcagccgagccctgcccttagctggaggtcgacaggtgggatcctggatgtctacatcttcctgggcccagagcccaagagcgtggtgcagcagtacctggacgttgtgggatacccgttcatgccgccatactggggcctgggcttccacctgtgccgctggggctactcctccaccgctatcacccgccaggtggtggagaacatgaccagggcccacttccccctggacgtccaatggaacgacctggactacatggactcccggagggacttcacgttcaacaaggatggcttccgggacttcccggccatggtgcaggagctgcaccagggcggccggcgctacatgatgatcgtggatcctgccatcagcagctcgggccctgccgggagctacaggccctacgacgagggtctgcggaggggggttttcatcaccaacgagaccggccagccgctgattgggaaggtatggcccgggtccactgccttccccgacttcaccaaccccacagccctggcctggtgggaggacatggtggctgagttccatgaccaggtgcccttcgacggcatgtggattgacatgaacgagccttccaacttcatcagaggctctgaggacggctgccccaacaatgagctggagaacccaccctacgtgcctggggtggttggggggaccctccaggcggccaccatctgtgcctccagccaccagtttctctccacacactacaacctgcacaacctctacggcctgaccgaagccatcgcctcccacagggcgctggtgaaggctcgggggacacgcccatttgtgatctcccgctcgacctttgctggccacggccgatacgccggccactggacgggggacgtgtggagctcctgggagcagctcgcctcctccgtgccagaaatcctgcagtttaacctgctgggggtgcctctggtcggggccgacgtctgcggcttcctgggcaacacctcagaggagctgtgtgtgcgctggacccagctgggggccttctaccccttcatgcggaaccacaacagcctgctcagtctgccccaggagccgtacagcttcagcgagccggcccagcaggccatgaggaaggccctcaccctgcgctacgcactcctcccccacctctacacactgttccaccaggcccacgtcgcgggggagaccgtggcccggcccctcttcctggagttccccaaggactctagcacctggactgtggaccaccagctcctgtggggggaggccctgctcatcaccccagtgctccaggccgggaaggccgaagtgactggctacttccccttgggcacatggtacgacctgcagacggtgccaatagaggcccttggcagcctcccacccccacctgcagctccccgtgagccagccatccacagcgaggggcagtgggtgacgctgccggcccccctggacaccatcaacgtccacctccgggctgggtacatcatccccctgcagggccctggcctcacaaccacagagtcccgccagcagcccatggccctggctgtggccctgaccaagggtggagaggcccgaggggagctgttctgggacgatggagagagcctggaagtgctggagcgaggggcctacacacaggtcatcttcctggccaggaataacacgatcgtgaatgagctggtacgtgtgaccagtgagggagctggcctgcagctgcagaaggtgactgtcctgggcgtggccacggcgccccagcaggtcctctccaacggtgtccctgtctccaacttcacctacagccccgacaccaaggtcctggacatctgtgtctcgctgttgatgggagagcagtttctcgtcagctggtgttagcgagcggccgctcttagtagcagtatcgatcccagcccacttttccccaatacgactacgagatctgtggcttctagctgcccgggtggcatccctgtgacccctccccagtgcctctcctggccctggaagttgccactccagtgcccaccagccttgtcctaataaaattaagttgcatcattttgtctgactaggtgtccttctataatattatggggtggaggggggtggtatggagcaaggggcaagttggggtccttcaacgtcgaactgtagcactctggatagctagctagcgtttgtagatagtttcaaggatagcaaccaacaacacgatagtttagaaattgttctagatcttctgctactactcgagagatagttgacttctagaagactctggatagagagcttcctgtggtttctatttcaacacttcgagcgatttagatagaggcgtcaattgagaacaaaaactggacacctgtttctagaacactagtgctagtcttctcaaggcttgatacgtcctgccactcacacacaaaaaaccaacacacagattaatgaaaataaagatcttttattagagagcgagtggatagtttagagtcgcttgagacttatcctgtgtccaactagccaagagtagagagagagtgactaggtggatcgagagatcgtcgtctatttgactgctagcctgtgttctcgtcgtagtccaaatcttcaatactctggcgactagtaacttgaatctgtgtatctaacacgacaaggctactcctttgagtttctagtgataagtgcgactggatctagctagttgagtttctagaaactacgtccaaagctactagcactacacgtgcggaccgagcggcctaagctcgcgaaggaacccctagtgatggagttggccactccctctctgcgcgctcgctcgctcactgaggccgggcgaccaaaggtcgcccgacgcccgggctttgcccgggcggcctcagtgagcgagcgagcgcgcagagagggagtggccaagacgatttaaatgacaagcttggcgtaatcatggtcatagctgtttcctgtgtgaaattgttatccgctcacaattccacacaacatacgagccggaagcataaagtgtaaagcctggggtgcctaatgagtgagctaactcacattaattgcgttgcgctcactgcccgctttccagtcgggaaacctgtcgtgccagctgcattaatgaatcggccaacgcgcggggagaggcggtttgcgtattgggcgctcttccgcttcctcgctcactgactcgctgcgctcggtcgttcggctgcggcgagcggtatcagctcactcaaaggcggtaatacggttatccacagaatcaggggataacgcaggaaagaacatgtgagcaaaaggccagcaaaaggccaggaaccgtaaaaaggccgcgttgctggcgtttttccataggctccgcccccctgacgagcatcacaaaaatcgacgctcaagtcagaggtggcgaaacccgacaggactataaagataccaggcgtttccccctggaagctccctcgtgcgctctcctgttccgaccctgccgcttaccggatacctgtccgcctttctcccttcgggaagcgtggcgctttctcatagctcacgctgtaggtatctcagttcggtgtaggtcgttcgctccaagctgggctgtgtgcacgaaccccccgttcagcccgaccgctgcgccttatccggtaactatcgtcttgagtccaacccggtaagacacgacttatcgccactggcagcagccactggtaacaggattagcagagcgaggtatgtaggcggtgctacagagttcttgaagtggtggcctaactacggctacactagaagaacagtatttggtatctgcgctctgctgaagccagttaccttcggaaaaagagttggtagctcttgatccggcaaacaaaccaccgctggtagcggtggtttttttgtttgcaagcagcagattacgcgcagaaaaaaaggatctcaagaagatcctttgatcttttctacggggtctgacgctcagtggaacgaaaactcacgttaagggattttggtcatgagattatcaaaaaggatcttcacctagatccttttaaattaaaaatgaagttttaaatcaatctaaagtatatatgagtaaacttggtctgacagttagaaaaactcatcgagcatcaaatgaaactgcaatttattcatatcaggattatcaataccatatttttgaaaaagccgtttctgtaatgaaggagaaaactcaccgaggcagttccataggatggcaagatcctggtatcggtctgcgattccgactcgtccaacatcaatacaacctattaatttcccctcgtcaaaaataaggttatcaagtgagaaatcaccatgagtgacgactgaatccggtgagaatggcaaaagtttatgcatttctttccagacttgttcaacaggccagccattacgctcgtcatcaaaatcactcgcatcaaccaaaccgttattcattcgtgattgcgcctgagcgagacgaaatacgcgatcgctgttaaaaggacaattacaaacaggaatcgaatgcaaccggcgcaggaacactgccagcgcatcaacaatattttcacctgaatcaggatattcttctaatacctggaatgctgtttttccggggatcgcagtggtgagtaaccatgcatcatcaggagtacggataaaatgcttgatggtcggaagaggcataaattccgtcagccagtttagtctgaccatctcatctgtaacatcattggcaacgctacctttgccatgtttcagaaacaactctggcgcatcgggcttcccatacaagcgatagattgtcgcacctgattgcccgacattatcgcgagcccatttatacccatataaatcagcatccatgttggaatttaatcgcggcctcgacgtttcccgttgaatatggctcatactcttcctttttcaatattattgaagcatttatcagggttattgtctcatgagcggatacatatttgaatgtatttagaaaaataaacaaataggggttccgcgcacatttccccgaaaagtgccacctgacgtctaagaaaccattattatcatgacattaacctataaaaataggcgtatcacgaggccctttcgtctcgcgcgtttcggtgatgacggtgaaaacctctgacacatgcagctcccggagacggtcacagcttgtctgtaagcggatgccgggagcagacaagcccgtcagggcgcgtcagcgggtgttggcgggtgtcggggctggcttaactatgcggcatcagagcagattgtactgagagtgcaccatatgcggtgtgaaataccgcacagatgcgtaaggagaaaataccgcatcaggc

SEQ ID NO: 157 - DNA, 6839 bp, Artificial Sequence
  Description of Artificial Sequence: Synthetic polynucleotide
gccattcgccattcaggctgcgcaactgttgggaagggcgatcggtgcgggcctcttcgctattacgccagctggcgaaagggggatgtgctgcaaggcgattaagttgggtaacgccagggttttcccagtcacgacgttgtaaaacgacggccagtgaattcctcgagatttaaatgacgttggccactccctctctgcgcgctcgctcgctcactgaggccgggcgaccaaaggtcgcccgacgcccgggctttgcccgggcggcctcagtgagcgagcgagcgcgcagagagggagtggccaactccatcactaggggttcctgagtttaaacttcgtcgaggccgcacgcgtaggttaatttttaaaaagcagtcaaaagtccaagtggcccttggcagcatttactctctctgtttgctctggttaataatctcaggagcacaaacattccccctgttcaaacatgtcctaatactctgtctctgcaagggtcatcagtagttttccatcttactcaacatcctcccagtgagtcatatgtttgctcactgaaggttactagttaacaggcatcccttaaacaggatataaaaggacttcagcaggactgctcgaaacatcccacttcagatcgcctggagacgccatccacgctgttttgacctccatagaagacaccgggaccgatccagcctccgcggccgggaacggtgcattggaacgcggattccccgtgccaagagtgacgtaagtaccgcctatagactctataggcacacccctttggctcttatgcatgaacggtggagggcagtgtagtctgagcagtactcgttgctgccgcgcgcgccaccagacataatagctgacagactaacagactgttcctttccatgggtcttttctgcaggccaccatgggagtgaggcacccgccctgctcccaccggctcctggccgtctgcgccctcgtgtccttggcaaccgctgcactcctggggcacatcctactccatgatttcctgctggttccccgagagctgagtggctcctccccagtcctggaggagactcacccagctcaccagcagggagccagcagaccagggccccgggatgcccaggcacaccccggccgtcccagagcagtgcccacacagtgcgacgtcccccccaacagccgcttcgattgcgcccctgacaaggccatcacccaggaacagtgcgaggcccgcggctgctgctacatccctgcaaagcaggggctgcagggagcccagatggggcagccctggtgcttcttcccacccagctaccccagctacaagctggagaacctgagctcctctgaaatgggctacacggccaccctgacccgtaccacccccaccttcttccccaaggacatcctgaccctgcggctggacgtgatgatggagactgagaaccgcctccacttcacgatcaaagatccagctaacaggcgctacgaggtgcccttggagaccccgcgtgtccacagccgggcaccgtccccactctacagcgtggagttctccgaggagcccttcggggtgatcgtgcaccggcagctggacggccgcgtgctgctgaacacgacggtggcgcccctgttctttgcggaccagttccttcagctgtccacctcgctgccctcgcagtatatcacaggcctcgccgagcacctcagtcccctgatgctcagcaccagctggaccaggatcaccctgtggaaccgggaccttgcgcccacgcccggtgcgaacctctacgggtctcaccctttctacctggcgctggaggacggcgggtcggcacacggggtgttcctgctaaacagcaatgccatggatgtggtcctgcagccgagccctgcccttagctggaggtcgacaggtgggatcctggatgtctacatcttcctgggcccagagcccaagagcgtggtgcagcagtacctggacgttgtgggatacccgttcatgccgccatactggggcctgggcttccacctgtgccgctggggctactcctccaccgctatcacccgccaggtggtggagaacatgaccagggcccacttccccctggacgtccaatggaacgacctggactacatggactcccggagggacttcacgttcaacaaggatggcttccgggacttcccggccatggtgcaggagctgcaccagggcggccggcgctacatgatgatcgtggatcctgccatcagcagctcgggccctgccgggagctacaggccctacgacgagggtctgcggaggggggttttcatcaccaacgagaccggccagccgctgattgggaaggtatggcccgggtccactgccttccccgacttcaccaaccccacagccctggcctggtgggaggacatggtggctgagttccatgaccaggtgcccttcgacggcatgtggattgacatgaacgagccttccaacttcatcagaggctctgaggacggctgccccaacaatgagctggagaacccaccctacgtgcctggggtggttggggggaccctccaggcggccaccatctgtgcctccagccaccagtttctctccacacactacaacctgcacaacctctacggcctgaccgaagccatcgcctcccacagggcgctggtgaaggctcgggggacacgcccatttgtgatctcccgctcgacctttgctggccacggccgatacgccggccactggacgggggacgtgtggagctcctgggagcagctcgcctcctccgtgccagaaatcctgcagtttaacctgctgggggtgcctctggtcggggccgacgtctgcggcttcctgggcaacacctcagaggagctgtgtgtgcgctggacccagctgggggccttctaccccttcatgcggaaccacaacagcctgctcagtctgccccaggagccgtacagcttcagcgagccggcccagcaggccatgaggaaggccctcaccctgcgctacgcactcctcccccacctctacacactgttccaccaggcccacgtcgcgggggagaccgtggcccggcccctcttcctggagttccccaaggactctagcacctggactgtggaccaccagctcctgtggggggaggccctgctcatcaccccagtgctccaggccgggaaggccgaagtgactggctacttccccttgggcacatggtacgacctgcagacggtgccaatagaggcccttggcagcctcccacccccacctgcagctccccgtgagccagccatccacagcgaggggcagtgggtgacgctgccggcccccctggacaccatcaacgtccacctccgggctgggtacatcatccccctgcagggccctggcctcacaaccacagagtcccgccagcagcccatggccctggctgtggccctgaccaagggtggagaggcccgaggggagctgttctgggacgatggagagagcctggaagtgctggagcgaggggcctacacacaggtcatcttcctggccaggaataacacgatcgtgaatgagctggtacgtgtgaccagtgagggagctggcctgcagctgcagaaggtgactgtcctgggcgtggccacggcgccccagcaggtcctctccaacggtgtccctgtctccaacttcacctacagccccgacaccaaggtcctggacatctgtgtctcgctgttgatgggagagcagtttctcgtcagctggtgttagccgggcggagtgtgttagtctctccagagggaggctggttccccagggaagcagagcctgtgtgcgggcagcagctgtgtgcgggcctgggggttgttaagtgcaattatttttaataaaaggggcatttggaaaaaaaaaaaaaaggtagcagtcgacagatgaattctgcagatctgtggcttctagctgcccgggtggcatccctgtgacccctccccagtgcctctcctggccctggaagttgccactccagtgcccaccagccttgtcctaataaaattaagttgcatcattttgtctgactaggtgtccttctataatattatggggtggaggggggtggtatggagcaaggggcaagttgggaagacaacctgagttgttgggattccaggcatcgagtagataagtagcatggcgggttaatcattaactacacacgtgcggaccgagcggcctaagctcgcgaaggaacccctagtgatggagttggccactccctctctgcgcgctcgctcgctcactgaggccgggcgaccaaaggtcgcccgacgcccgggctttgcccgggcggcctcagtgagcgagcgagcgcgcagagagggagtggccaagacgatttaaatgacaagcttggcgtaatcatggtcatagctgtttcctgtgtgaaattgttatccgctcacaattccacacaacatacgagccggaagcataaagtgtaaagcctggggtgcctaatgagtgagctaactcacattaattgcgttgcgctcactgcccgctttccagtcgggaaacctgtcgtgccagctgcattaatgaatcggccaacgcgcggggagaggcggtttgcgtattgggcgctcttccgcttcctcgctcactgactcgctgcgctcggtcgttcggctgcggcgagcggtatcagctcactcaaaggcggtaatacggttatccacagaatcaggggataacgcaggaaagaacatgtgagcaaaaggccagcaaaaggccaggaaccgtaaaaaggccgcgttgctggcgtttttccataggctccgcccccctgacgagcatcacaaaaatcgacgctcaagtcagaggtggcgaaacccgacaggactataaagataccaggcgtttccccctggaagctccctcgtgcgctctcctgttccgaccctgccgcttaccggatacctgtccgcctttctcccttcgggaagcgtggcgctttctcatagctcacgctgtaggtatctcagttcggtgtaggtcgttcgctccaagctgggctgtgtgcacgaaccccccgttcagcccgaccgctgcgccttatccggtaactatcgtcttgagtccaacccggtaagacacgacttatcgccactggcagcagccactggtaacaggattagcagagcgaggtatgtaggcggtgctacagagttcttgaagtggtggcctaactacggctacactagaagaacagtatttggtatctgcgctctgctgaagccagttaccttcggaaaaagagttggtagctcttgatccggcaaacaaaccaccgctggtagcggtggtttttttgtttgcaagcagcagattacgcgcagaaaaaaaggatctcaagaagatcctttgatcttttctacggggtctgacgctcagtggaacgaaaactcacgttaagggattttggtcatgagattatcaaaaaggatcttcacctagatccttttaaattaaaaatgaagttttaaatcaatctaaagtatatatgagtaaacttggtctgacagttagaaaaactcatcgagcatcaaatgaaactgcaatttattcatatcaggattatcaataccatatttttgaaaaagccgtttctgtaatgaaggagaaaactcaccgaggcagttccataggatggcaagatcctggtatcggtctgcgattccgactcgtccaacatcaatacaacctattaatttcccctcgtcaaaaataaggttatcaagtgagaaatcaccatgagtgacgactgaatccggtgagaatggcaaaagtttatgcatttctttccagacttgttcaacaggccagccattacgctcgtcatcaaaatcactcgcatcaaccaaaccgttattcattcgtgattgcgcctgagcgagacgaaatacgcgatcgctgttaaaaggacaattacaaacaggaatcgaatgcaaccggcgcaggaacactgccagcgcatcaacaatattttcacctgaatcaggatattcttctaatacctggaatgctgtttttccggggatcgcagtggtgagtaaccatgcatcatcaggagtacggataaaatgcttgatggtcggaagaggcataaattccgtcagccagtttagtctgaccatctcatctgtaacatcattggcaacgctacctttgccatgtttcagaaacaactctggcgcatcgggcttcccatacaagcgatagattgtcgcacctgattgcccgacattatcgcgagcccatttatacccatataaatcagcatccatgttggaatttaatcgcggcctcgacgtttcccgttgaatatggctcatactcttcctttttcaatattattgaagcatttatcagggttattgtctcatgagcggatacatatttgaatgtatttagaaaaataaacaaataggggttccgcgcacatttccccgaaaagtgccacctgacgtctaagaaaccattattatcatgacattaacctataaaaataggcgtatcacgaggccctttcgtctcgcgcgtttcggtgatgacggtgaaaacctctgacacatgcagctcccggagacggtcacagcttgtctgtaagcggatgccgggagcagacaagcccgtcagggcgcgtcagcgggtgttggcgggtgtcggggctggcttaactatgcggcatcagagcagattgtactgagagtgcaccatatgcggtgtgaaataccgcacagatgcgtaaggagaaaataccgcatcaggc

SEQ ID NO: 158 - DNA, 7266 bp, Artificial Sequence
  Description of Artificial Sequence: Synthetic polynucleotide
gccattcgccattcaggctgcgcaactgttgggaagggcgatcggtgcgggcctcttcgctattacgccagctggcgaaagggggatgtgctgcaaggcgattaagttgggtaacgccagggttttcccagtcacgacgttgtaaaacgacggccagtgaattcctcgagatttaaatgacgttggccactccctctctgcgcgctcgctcgctcactgaggccgggcgaccaaaggtcgcccgacgcccgggctttgcccgggcggcctcagtgagcgagcgagcgcgcagagagggagtggccaactccatcactaggggttcctgagtttaaacttcgtcgaggccgcacgcgtaggttaatttttaaaaagcagtcaaaagtccaagtggcccttggcagcatttactctctctgtttgctctggttaataatctcaggagcacaaacattccccctgttcaaacatgtcctaatactctgtctctgcaagggtcatcagtagttttccatcttactcaacatcctcccagtgagtcatatgtttgctcactgaaggttactagttaacaggcatcccttaaacaggatataaaaggacttcagcaggactgctcgaaacatcccacttcagatcgcctggagacgccatccacgctgttttgacctccatagaagacaccgggaccgatccagcctccgcggccgggaacggtgcattggaacgcggattccccgtgccaagagtgacgtaagtaccgcctatagactctataggcacacccctttggctcttatgcatgaacggtggagggcagtgtagtctgagcagtactcgttgctgccgcgcgcgccaccagacataatagctgacagactaacagactgttcctttccatgggtcttttctgcaggccaccatgggagtgaggcacccgccctgctcccaccggctcctggccgtctgcgccctcgtgtccttggcaaccgctgcactcctggggcacatcctactccatgatttcctgctggttccccgagagctgagtggctcctccccagtcctggaggagactcacccagctcaccagcagggagccagcagaccagggccccgggatgcccaggcacaccccggccgtcccagagcagtgcccacacagtgcgacgtcccccccaacagccgcttcgattgcgcccctgacaaggccatcacccaggaacagtgcgaggcccgcggctgctgctacatccctgcaaagcaggggctgcagggagcccagatggggcagccctggtgcttcttcccacccagctaccccagctacaagctggagaacctgagctcctctgaaatgggctacacggccaccctgacccgtaccacccccaccttcttccccaaggacatcctgaccctgcggctggacgtgatgatggagactgagaaccgcctccacttcacgatcaaagatccagctaacaggcgctacgaggtgcccttggagaccccgcgtgtccacagccgggcaccgtccccactctacagcgtggagttctccgaggagcccttcggggtgatcgtgcaccggcagctggacggccgcgtgctgctgaacacgacggtggcgcccctgttctttgcggaccagttccttcagctgtccacctcgctgccctcgcagtatatcacaggcctcgccgagcacctcagtcccctgatgctcagcaccagctggaccaggatcaccctgtggaaccgggaccttgcgcccacgcccggtgcgaacctctacgggtctcaccctttctacctggcgctggaggacggcgggtcggcacacggggtgttcctgctaaacagcaatgccatggatgtggtcctgcagccgagccctgcccttagctggaggtcgacaggtgggatcctggatgtctacatcttcctgggcccagagcccaagagcgtggtgcagcagtacctggacgttgtgggatacccgttcatgccgccatactggggcctgggcttccacctgtgccgctggggctactcctccaccgctatcacccgccaggtggtggagaacatgaccagggcccacttccccctggacgtccaatggaacgacctggactacatggactcccggagggacttcacgttcaacaaggatggcttccgggacttcccggccatggtgcaggagctgcaccagggcggccggcgctacatgatgatcgtggatcctgccatcagcagctcgggccctgccgggagctacaggccctacgacgagggtctgcggaggggggttttcatcaccaacgagaccggccagccgctgattgggaaggtatggcccgggtccactgccttccccgacttcaccaaccccacagccctggcctggtgggaggacatggtggctgagttccatgaccaggtgcccttcgacggcatgtggattgacatgaacgagccttccaacttcatcagaggctctgaggacggctgccccaacaatgagctggagaacccaccctacgtgcctggggtggttggggggaccctccaggcggccaccatctgtgcctccagccaccagtttctctccacacactacaacctgcacaacctctacggcctgaccgaagccatcgcctcccacagggcgctggtgaaggctcgggggacacgcccatttgtgatctcccgctcgacctttgctggccacggccgatacgccggccactggacgggggacgtgtggagctcctgggagcagctcgcctcctccgtgccagaaatcctgcagtttaacctgctgggggtgcctctggtcggggccgacgtctgcggcttcctgggcaacacctcagaggagctgtgtgtgcgctggacccagctgggggccttctaccccttcatgcggaaccacaacagcctgctcagtctgccccaggagccgtacagcttcagcgagccggcccagcaggccatgaggaaggccctcaccctgcgctacgcactcctcccccacctctacacactgttccaccaggcccacgtcgcgggggagaccgtggcccggcccctcttcctggagttccccaaggactctagcacctggactgtggaccaccagctcctgtggggggaggccctgctcatcaccccagtgctccaggccgggaaggccgaagtgactggctacttccccttgggcacatggtacgacctgcagacggtgccaatagaggcccttggcagcctcccacccccacctgcagctccccgtgagccagccatccacagcgaggggcagtgggtgacgctgccggcccccctggacaccatcaacgtccacctccgggctgggtacatcatccccctgcagggccctggcctcacaaccacagagtcccgccagcagcccatggccctggctgtggccctgaccaagggtggagaggcccgaggggagctgttctgggacgatggagagagcctggaagtgctggagcgaggggcctacacacaggtcatcttcctggccaggaataacacgatcgtgaatgagctggtacgtgtgaccagtgagggagctggcctgcagctgcagaaggtgactgtcctgggcgtggccacggcgccccagcaggtcctctccaacggtgtccctgtctccaacttcacctacagccccgacaccaaggtcctggacatctgtgtctcgctgttgatgggagagcagtttctcgtcagctggtgttagcgagcggccgctcttagtagcagtatcgatcccagcccacttttccccaatacgactacgagatctgtggcttctagctgcccgggtggcatccctgtgacccctccccagtgcctctcctggccctggaagttgccactccagtgcccaccagccttgtcctaataaaattaagttgcatcattttgtctgactaggtgtccttctataatattatggggtggaggggggtggtatggagcaaggggcaagttggggtccttcaacgtcgaactgtagcactctggatagctagctagcgtttgtagatagtttcaaggatagcaaccaacaacacgatagtttagaaattgttctagatcttctgctactactcgagagatagttgacttctagaagactctggatagagagcttcctgtggtttctatttcaacacttcgagcgatttagatagaggcgtcaattgagaacaaaaactggacacctgtttctagaacactagtgctagtcttctcaaggcttgatacgtcctgccactcacacacaaaaaaccaacacacagattaatgaaaataaagatcttttattagagagcgagtggatagtttagagtcgcttgagacttatcctgtgtccaactagccaagagtagagagagagtgactaggtggatcgagagatcgtcgtctatttgactgctagcctgtgttctcgtcgtagtccaaatcttcaatactctggcgactagtaacttgaatctgtgtatctaacacgacaaggctactcctttgagtttctagtgataagtgcgactggatctagctagttgagtttctagaaactacgtccaaagctactagcactacacgtgcggaccgagcggcctaagctcgcgaaggaacccctagtgatggagttggccactccctctctgcgcgctcgctcgctcactgaggccgggcgaccaaaggtcgcccgacgcccgggctttgcccgggcggcctcagtgagcgagcgagcgcgcagagagggagtggccaagacgatttaaatgacaagcttggcgtaatcatggtcatagctgtttcctgtgtgaaattgttatccgctcacaattccacacaacatacgagccggaagcataaagtgtaaagcctggggtgcctaatgagtgagctaactcacattaattgcgttgcgctcactgcccgctttccagtcgggaaacctgtcgtgccagctgcattaatgaatcggccaacgcgcggggagaggcggtttgcgtattgggcgctcttccgcttcctcgctcactgactcgctgcgctcggtcgttcggctgcggcgagcggtatcagctcactcaaaggcggtaatacggttatccacagaatcaggggataacgcaggaaagaacatgtgagcaaaaggccagcaaaaggccaggaaccgtaaaaaggccgcgttgctggcgtttttccataggctccgcccccctgacgagcatcacaaaaatcgacgctcaagtcagaggtggcgaaacccgacaggactataaagataccaggcgtttccccctggaagctccctcgtgcgctctcctgttccgaccctgccgcttaccggatacctgtccgcctttctcccttcgggaagcgtggcgctttctcatagctcacgctgtaggtatctcagttcggtgtaggtcgttcgctccaagctgggctgtgtgcacgaaccccccgttcagcccgaccgctgcgccttatccggtaactatcgtcttgagtccaacccggtaagacacgacttatcgccactggcagcagccactggtaacaggattagcagagcgaggtatgtaggcggtgctacagagttcttgaagtggtggcctaactacggctacactagaagaacagtatttggtatctgcgctctgctgaagccagttaccttcggaaaaagagttggtagctcttgatccggcaaacaaaccaccgctggtagcggtggtttttttgtttgcaagcagcagattacgcgcagaaaaaaaggatctcaagaagatcctttgatcttttctacggggtctgacgctcagtggaacgaaaactcacgttaagggattttggtcatgagattatcaaaaaggatcttcacctagatccttttaaattaaaaatgaagttttaaatcaatctaaagtatatatgagtaaacttggtctgacagttagaaaaactcatcgagcatcaaatgaaactgcaatttattcatatcaggattatcaataccatatttttgaaaaagccgtttctgtaatgaaggagaaaactcaccgaggcagttccataggatggcaagatcctggtatcggtctgcgattccgactcgtccaacatcaatacaacctattaatttcccctcgtcaaaaataaggttatcaagtgagaaatcaccatgagtgacgactgaatccggtgagaatggcaaaagtttatgcatttctttccagacttgttcaacaggccagccattacgctcgtcatcaaaatcactcgcatcaaccaaaccgttattcattcgtgattgcgcctgagcgagacgaaatacgcgatcgctgttaaaaggacaattacaaacaggaatcgaatgcaaccggcgcaggaacactgccagcgcatcaacaatattttcacctgaatcaggatattcttctaatacctggaatgctgtttttccggggatcgcagtggtgagtaaccatgcatcatcaggagtacggataaaatgcttgatggtcggaagaggcataaattccgtcagccagtttagtctgaccatctcatctgtaacatcattggcaacgctacctttgccatgtttcagaaacaactctggcgcatcgggcttcccatacaagcgatagattgtcgcacctgattgcccgacattatcgcgagcccatttatacccatataaatcagcatccatgttggaatttaatcgcggcctcgacgtttcccgttgaatatggctcatactcttcctttttcaatattattgaagcatttatcagggttattgtctcatgagcggatacatatttgaatgtatttagaaaaataaacaaataggggttccgcgcacatttccccgaaaagtgccacctgacgtctaagaaaccattattatcatgacattaacctataaaaataggcgtatcacgaggccctttcgtctcgcgcgtttcggtgatgacggtgaaaacctctgacacatgcagctcccggagacggtcacagcttgtctgtaagcggatgccgggagcagacaagcccgtcagggcgcgtcagcgggtgttggcgggtgtcggggctggcttaactatgcggcatcagagcagattgtactgagagtgcaccatatgcggtgtgaaataccgcacagatgcgtaaggagaaaataccgcatcaggc

SEQ ID NO: 159 - DNA, 6629 bp, Artificial Sequence
  Description of Artificial Sequence: Synthetic polynucleotide
gccattcgccattcaggctgcgcaactgttgggaagggcgatcggtgcgggcctcttcgctattacgccagctggcgaaagggggatgtgctgcaaggcgattaagttgggtaacgccagggttttcccagtcacgacgttgtaaaacgacggccagtgaattcctcgagatttaaatgacgttggccactccctctctgcgcgctcgctcgctcactgaggccgggcgaccaaaggtcgcccgacgcccgggctttgcccgggcggcctcagtgagcgagcgagcgcgcagagagggagtggccaactccatcactaggggttcctgagtttaaacttcgtagaggccgcacgcgtaggttaatttttaaaaagcagtcaaaagtccaagtggcccttggcagcatttactctctctgtttgctctggttaataatctcaggagcacaaacattccccctgttcaaacatgtcctaatactctgtctctgcaagggtcatcagtagttttccatcttactcaacatcctcccagtgagtcatatgtttgctcactgaaggttactagttaacaggcatcccttaaacaggatataaaaggacttcagcaggactgctcgaaacatcccactcagccaccggtaccgagctcggatccactagtaacggccgccagtgtgctggaattcggctttccaggccatctccaaccatgggagtgaggcacccgccctgctcccaccggctcctggccgtctgcgccctcgtgtccttggcaaccgctgcactcctggggcacatcctactccatgatttcctgctggttccccgagagctgagtggctcctccccagtcctggaggagactcacccagctcaccagcagggagccagcagaccagggccccgggatgcccaggcacaccccggccgtcccagagcagtgcccacacagtgcgacgtcccccccaacagccgcttcgattgcgcccctgacaaggccatcacccaggaacagtgcgaggcccgcggctgctgctacatccctgcaaagcaggggctgcagggagcccagatggggcagccctggtgcttcttcccacccagctaccccagctacaagctggagaacctgagctcctctgaaatgggctacacggccaccctgacccgtaccacccccaccttcttccccaaggacatcctgaccctgcggctggacgtgatgatggagactgagaaccgcctccacttcacgatcaaagatccagctaacaggcgctacgaggtgcccttggagaccccgcgtgtccacagccgggcaccgtccccactctacagcgtggagttctccgaggagcccttcggggtgatcgtgcaccggcagctggacggccgcgtgctgctgaacacgacggtggcgcccctgttctttgcggaccagttccttcagctgtccacctcgctgccctcgcagtatatcacaggcctcgccgagcacctcagtcccctgatgctcagcaccagctggaccaggatcaccctgtggaaccgggaccttgcgcccacgcccggtgcgaacctctacgggtctcaccctttctacctggcgctggaggacggcgggtcggcacacggggtgttcctgctaaacagcaatgccatggatgtggtcctgcagccgagccctgcccttagctggaggtcgacaggtgggatcctggatgtctacatcttcctgggcccagagcccaagagcgtggtgcagcagtacctggacgttgtgggatacccgttcatgccgccatactggggcctgggcttccacctgtgccgctggggctactcctccaccgctatcacccgccaggtggtggagaacatgaccagggcccacttccccctggacgtccaatggaacgacctggactacatggactcccggagggacttcacgttcaacaaggatggcttccgggacttcccggccatggtgcaggagctgcaccagggcggccggcgctacatgatgatcgtggatcctgccatcagcagctcgggccctgccgggagctacaggccctacgacgagggtctgcggaggggggttttcatcaccaacgagaccggccagccgctgattgggaaggtatggcccgggtccactgccttccccgacttcaccaaccccacagccctggcctggtgggaggacatggtggctgagttccatgaccaggtgcccttcgacggcatgtggattgacatgaacgagccttccaacttcatcagaggctctgaggacggctgccccaacaatgagctggagaacccaccctacgtgcctggggtggttggggggaccctccaggcggccaccatctgtgcctccagccaccagtttctctccacacactacaacctgcacaacctctacggcctgaccgaagccatcgcctcccacagggcgctggtgaaggctcgggggacacgcccatttgtgatctcccgctcgacctttgctggccacggccgatacgccggccactggacgggggacgtgtggagctcctgggagcagctcgcctcctccgtgccagaaatcctgcagtttaacctgctgggggtgcctctggtcggggccgacgtctgcggcttcctgggcaacacctcagaggagctgtgtgtgcgctggacccagctgggggccttctaccccttcatgcggaaccacaacagcctgctcagtctgccccaggagccgtacagcttcagcgagccggcccagcaggccatgaggaaggccctcaccctgcgctacgcactcctcccccacctctacacactgttccaccaggcccacgtcgcgggggagaccgtggcccggcccctcttcctggagttccccaaggactctagcacctggactgtggaccaccagctcctgtggggggaggccctgctcatcaccccagtgctccaggccgggaaggccgaagtgactggctacttccccttgggcacatggtacgacctgcagacggtgccaatagaggcccttggcagcctcccacccccacctgcagctccccgtgagccagccatccacagcgaggggcagtgggtgacgctgccggcccccctggacaccatcaacgtccacctccgggctgggtacatcatccccctgcagggccctggcctcacaaccacagagtcccgccagcagcccatggccctggctgtggccctgaccaagggtggagaggcccgaggggagctgttctgggacgatggagagagcctggaagtgctggagcgaggggcctacacacaggtcatcttcctggccaggaataacacgatcgtgaatgagctggtacgtgtgaccagtgagggagctggcctgcagctgcagaaggtgactgtcctgggcgtggccacggcgccccagcaggtcctctccaacggtgtccctgtctccaacttcacctacagccccgacaccaaggtcctggacatctgtgtctcgctgttgatgggagagcagtttctcgtcagctggtgttagccgggcggagtgtgttagtctctccagagggaggctggttccccagggaagcagagcctgtgtgcgggcagcagctgtgtgcgggcctgggggttgttaagtgcaattatttttaataaaaggggcatttggaaaaaaaaaaaaaaggtagcagtcgacagatgaattctgcagatctgtggcttctagctgcccgggtggcatccctgtgacccctccccagtgcctctcctggccctggaagttgccactccagtgcccaccagccttgtcctaataaaattaagttgcatcattttgtctgactaggtgtccttctataatattatggggtggaggggggtggtatggagcaaggggcaagttgggaagacaacctgagttgttgggattccaggcatcgagtagataagtagcatggcgggttaatcattaactacacacgtgcggaccgagcggcctaagctcgcgaaggaacccctagtgatggagttggccactccctctctgcgcgctcgctcgctcactgaggccgggcgaccaaaggtcgcccgacgcccgggctttgcccgggcggcctcagtgagcgagcgagcgcgcagagagggagtggccaagacgatttaaatgacaagcttggcgtaatcatggtcatagctgtttcctgtgtgaaattgttatccgctcacaattccacacaacatacgagccggaagcataaagtgtaaagcctggggtgcctaatgagtgagctaactcacattaattgcgttgcgctcactgcccgctttccagtcgggaaacctgtcgtgccagctgcattaatgaatcggccaacgcgcggggagaggcggtttgcgtattgggcgctcttccgcttcctcgctcactgactcgctgcgctcggtcgttcggctgcggcgagcggtatcagctcactcaaaggcggtaatacggttatccacagaatcaggggataacgcaggaaagaacatgtgagcaaaaggccagcaaaaggccaggaaccgtaaaaaggccgcgttgctggcgtttttccataggctccgcccccctgacgagcatcacaaaaatcgacgctcaagtcagaggtggcgaaacccgacaggactataaagataccaggcgtttccccctggaagctccctcgtgcgctctcctgttccgaccctgccgcttaccggatacctgtccgcctttctcccttcgggaagcgtggcgctttctcatagctcacgctgtaggtatctcagttcggtgtaggtcgttcgctccaagctgggctgtgtgcacgaaccccccgttcagcccgaccgctgcgccttatccggtaactatcgtcttgagtccaacccggtaagacacgacttatcgccactggcagcagccactggtaacaggattagcagagcgaggtatgtaggcggtgctacagagttcttgaagtggtggcctaactacggctacactagaagaacagtatttggtatctgcgctctgctgaagccagttaccttcggaaaaagagttggtagctcttgatccggcaaacaaaccaccgctggtagcggtggtttttttgtttgcaagcagcagattacgcgcagaaaaaaaggatctcaagaagatcctttgatcttttctacggggtctgacgctcagtggaacgaaaactcacgttaagggattttggtcatgagattatcaaaaaggatcttcacctagatccttttaaattaaaaatgaagttttaaatcaatctaaagtatatatgagtaaacttggtctgacagttagaaaaactcatcgagcatcaaatgaaactgcaatttattcatatcaggattatcaataccatatttttgaaaaagccgtttctgtaatgaaggagaaaactcaccgaggcagttccataggatggcaagatcctggtatcggtctgcgattccgactcgtccaacatcaatacaacctattaatttcccctcgtcaaaaataaggttatcaagtgagaaatcaccatgagtgacgactgaatccggtgagaatggcaaaagtttatgcatttctttccagacttgttcaacaggccagccattacgctcgtcatcaaaatcactcgcatcaaccaaaccgttattcattcgtgattgcgcctgagcgagacgaaatacgcgatcgctgttaaaaggacaattacaaacaggaatcgaatgcaaccggcgcaggaacactgccagcgcatcaacaatattttcacctgaatcaggatattcttctaatacctggaatgctgtttttccggggatcgcagtggtgagtaaccatgcatcatcaggagtacggataaaatgcttgatggtcggaagaggcataaattccgtcagccagtttagtctgaccatctcatctgtaacatcattggcaacgctacctttgccatgtttcagaaacaactctggcgcatcgggcttcccatacaagcgatagattgtcgcacctgattgcccgacattatcgcgagcccatttatacccatataaatcagcatccatgttggaatttaatcgcggcctcgacgtttcccgttgaatatggctcatactcttcctttttcaatattattgaagcatttatcagggttattgtctcatgagcggatacatatttgaatgtatttagaaaaataaacaaataggggttccgcgcacatttccccgaaaagtgccacctgacgtctaagaaaccattattatcatgacattaacctataaaaataggcgtatcacgaggccctttcgtctcgcgcgtttcggtgatgacggtgaaaacctctgacacatgcagctcccggagacggtcacagcttgtctgtaagcggatgccgggagcagacaagcccgtcagggcgcgtcagcgggtgttggcgggtgtcggggctggcttaactatgcggcatcagagcagattgtactgagagtgcaccatatgcggtgtgaaataccgcacagatgcgtaaggagaaaataccgcatcaggc

SEQ ID NO: 160 - DNA, 7132 bp, Artificial Sequence
  Description of Artificial Sequence: Synthetic polynucleotide
gccattcgccattcaggctgcgcaactgttgggaagggcgatcggtgcgggcctcttcgctattacgccagctggcgaaagggggatgtgctgcaaggcgattaagttgggtaacgccagggttttcccagtcacgacgttgtaaaacgacggccagtgaattcctcgagatttaaatgacgttggccactccctctctgcgcgctcgctcgctcactgaggccgggcgaccaaaggtcgcccgacgcccgggctttgcccgggcggcctcagtgagcgagcgagcgcgcagagagggagtggccaactccatcactaggggttcctgagtttaaacttcgtcgaggccgcacgcgtgaattacgtcatagggttagggaggtcggccgctctaggagttaatttttaaaaagcagtcaaaagtccaagtgcccttgcgagcatttactctctctgtttgctctggttaataatctcaggagcacaaacattccttactagttctaggagttaatttttaaaaagcagtcaaaagtccaagtgcccttgcgagcatttactctctctgtttgctctggttaataatctcaggagcacaaacattccttactagttctagagcggccgccagtgtgctggaattcggcttttttagggctggaagctacctttgacatcatttcctctgcgaatgcatgtataatttctacagaacctattagaaaggatcacccagcctctgcttttgtacaactttcccttaaaaaactgccaatcccactgctgtttggcccaatagtgagaactttttcctgctgcctcttggtgcttttgcctatggcccctattctgcctgctgaagacactcttgccagcatggacttaaacccctccagctctgacaatcctctttctcttttgttttacatgaagggtctggcagccaaagcaatcactcaaagttcaaaccttatcattttttgctttgttcctcttggccttggttttgtacatcagctttgaaaataccatcccagggttaatgctggggttaatttataactgagagtgctctagttctgcaatacaggacatgctataaaaatggaaagatgttgctttctgagagatcagcttacatgtggtaccgagctcggatccactagtaacggccgccagtgtgctggaattcggctttccaggccatctccaaccatgggagtgaggcacccgccctgctcccaccggctcctggccgtctgcgccctcgtgtccttggcaaccgctgcactcctggggcacatcctactccatgatttcctgctggttccccgagagctgagtggctcctccccagtcctggaggagactcacccagctcaccagcagggagccagcagaccagggccccgggatgcccaggcacaccccggccgtcccagagcagtgcccacacagtgcgacgtcccccccaacagccgcttcgattgcgcccctgacaaggccatcacccaggaacagtgcgaggcccgcggctgctgctacatccctgcaaagcaggggctgcagggagcccagatggggcagccctggtgcttcttcccacccagctaccccagctacaagctggagaacctgagctcctctgaaatgggctacacggccaccctgacccgtaccacccccaccttcttccccaaggacatcctgaccctgcggctggacgtgatgatggagactgagaaccgcctccacttcacgatcaaagatccagctaacaggcgctacgaggtgcccttggagaccccgcgtgtccacagccgggcaccgtccccactctacagcgtggagttctccgaggagcccttcggggtgatcgtgcaccggcagctggacggccgcgtgctgctgaacacgacggtggcgcccctgttctttgcggaccagttccttcagctgtccacctcgctgccctcgcagtatatcacaggcctcgccgagcacctcagtcccctgatgctcagcaccagctggaccaggatcaccctgtggaaccgggaccttgcgcccacgcccggtgcgaacctctacgggtctcaccctttctacctggcgctggaggacggcgggtcggcacacggggtgttcctgctaaacagcaatgccatggatgtggtcctgcagccgagccctgcccttagctggaggtcgacaggtgggatcctggatgtctacatcttcctgggcccagagcccaagagcgtggtgcagcagtacctggacgttgtgggatacccgttcatgccgccatactggggcctgggcttccacctgtgccgctggggctactcctccaccgctatcacccgccaggtggtggagaacatgaccagggcccacttccccctggacgtccaatggaacgacctggactacatggactcccggagggacttcacgttcaacaaggatggcttccgggacttcccggccatggtgcaggagctgcaccagggcggccggcgctacatgatgatcgtggatcctgccatcagcagctcgggccctgccgggagctacaggccctacgacgagggtctgcggaggggggttttcatcaccaacgagaccggccagccgctgattgggaaggtatggcccgggtccactgccttccccgacttcaccaaccccacagccctggcctggtgggaggacatggtggctgagttccatgaccaggtgcccttcgacggcatgtggattgacatgaacgagccttccaacttcatcagaggctctgaggacggctgccccaacaatgagctggagaacccaccctacgtgcctggggtggttggggggaccctccaggcggccaccatctgtgcctccagccaccagtttctctccacacactacaacctgcacaacctctacggcctgaccgaagccatcgcctcccacagggcgctggtgaaggctcgggggacacgcccatttgtgatctcccgctcgacctttgctggccacggccgatacgccggccactggacgggggacgtgtggagctcctgggagcagctcgcctcctccgtgccagaaatcctgcagtttaacctgctgggggtgcctctggtcggggccgacgtctgcggcttcctgggcaacacctcagaggagctgtgtgtgcgctggacccagctgggggccttctaccccttcatgcggaaccacaacagcctgctcagtctgccccaggagccgtacagcttcagcgagccggcccagcaggccatgaggaaggccctcaccctgcgctacgcactcctcccccacctctacacactgttccaccaggcccacgtcgcgggggagaccgtggcccggcccctcttcctggagttccccaaggactctagcacctggactgtggaccaccagctcctgtggggggaggccctgctcatcaccccagtgctccaggccgggaaggccgaagtgactggctacttccccttgggcacatggtacgacctgcagacggtgccaatagaggcccttggcagcctcccacccccacctgcagctccccgtgagccagccatccacagcgaggggcagtgggtgacgctgccggcccccctggacaccatcaacgtccacctccgggctgggtacatcatccccctgcagggccctggcctcacaaccacagagtcccgccagcagcccatggccctggctgtggccctgaccaagggtggagaggcccgaggggagctgttctgggacgatggagagagcctggaagtgctggagcgaggggcctacacacaggtcatcttcctggccaggaataacacgatcgtgaatgagctggtacgtgtgaccagtgagggagctggcctgcagctgcagaaggtgactgtcctgggcgtggccacggcgccccagcaggtcctctccaacggtgtccctgtctccaacttcacctacagccccgacaccaaggtcctggacatctgtgtctcgctgttgatgggagagcagtttctcgtcagctggtgttagccgggcggagtgtgttagtctctccagagggaggctggttccccagggaagcagagcctgtgtgcgggcagcagctgtgtgcgggcctgggggttgttaagtgcaattatttttaataaaaggggcatttggaaaaaaaaaaaaaaggtagcagtcgacagatgaattctgcagatctgtggcttctagctgcccgggtggcatccctgtgacccctccccagtgcctctcctggccctggaagttgccactccagtgcccaccagccttgtcctaataaaattaagttgcatcattttgtctgactaggtgtccttctataatattatggggtggaggggggtggtatggagcaaggggcaagttgggaagacaacctgagttgttgggattccaggcatcgagtagataagtagcatggcgggttaatcattaactacacacgtgcggaccgagcggcctaagctcgcgaaggaacccctagtgatggagttggccactccctctctgcgcgctcgctcgctcactgaggccgggcgaccaaaggtcgcccgacgcccgggctttgcccgggcggcctcagtgagcgagcgagcgcgcagagagggagtggccaagacgatttaaatgacaagcttggcgtaatcatggtcatagctgtttcctgtgtgaaattgttatccgctcacaattccacacaacatacgagccggaagcataaagtgtaaagcctggggtgcctaatgagtgagctaactcacattaattgcgttgcgctcactgcccgctttccagtcgggaaacctgtcgtgccagctgcattaatgaatcggccaacgcgcggggagaggcggtttgcgtattgggcgctcttccgcttcctcgctcactgactcgctgcgctcggtcgttcggctgcggcgagcggtatcagctcactcaaaggcggtaatacggttatccacagaatcaggggataacgcaggaaagaacatgtgagcaaaaggccagcaaaaggccaggaaccgtaaaaaggccgcgttgctggcgtttttccataggctccgcccccctgacgagcatcacaaaaatcgacgctcaagtcagaggtggcgaaacccgacaggactataaagataccaggcgtttccccctggaagctccctcgtgcgctctcctgttccgaccctgccgcttaccggatacctgtccgcctttctcccttcgggaagcgtggcgctttctcatagctcacgctgtaggtatctcagttcggtgtaggtcgttcgctccaagctgggctgtgtgcacgaaccccccgttcagcccgaccgctgcgccttatccggtaactatcgtcttgagtccaacccggtaagacacgacttatcgccactggcagcagccactggtaacaggattagcagagcgaggtatgtaggcggtgctacagagttcttgaagtggtggcctaactacggctacactagaagaacagtatttggtatctgcgctctgctgaagccagttaccttcggaaaaagagttggtagctcttgatccggcaaacaaaccaccgctggtagcggtggtttttttgtttgcaagcagcagattacgcgcagaaaaaaaggatctcaagaagatcctttgatcttttctacggggtctgacgctcagtggaacgaaaactcacgttaagggattttggtcatgagattatcaaaaaggatcttcacctagatccttttaaattaaaaatgaagttttaaatcaatctaaagtatatatgagtaaacttggtctgacagttagaaaaactcatcgagcatcaaatgaaactgcaatttattcatatcaggattatcaataccatatttttgaaaaagccgtttctgtaatgaaggagaaaactcaccgaggcagttccataggatggcaagatcctggtatcggtctgcgattccgactcgtccaacatcaatacaacctattaatttcccctcgtcaaaaataaggttatcaagtgagaaatcaccatgagtgacgactgaatccggtgagaatggcaaaagtttatgcatttctttccagacttgttcaacaggccagccattacgctcgtcatcaaaatcactcgcatcaaccaaaccgttattcattcgtgattgcgcctgagcgagacgaaatacgcgatcgctgttaaaaggacaattacaaacaggaatcgaatgcaaccggcgcaggaacactgccagcgcatcaacaatattttcacctgaatcaggatattcttctaatacctggaatgctgtttttccggggatcgcagtggtgagtaaccatgcatcatcaggagtacggataaaatgcttgatggtcggaagaggcataaattccgtcagccagtttagtctgaccatctcatctgtaacatcattggcaacgctacctttgccatgtttcagaaacaactctggcgcatcgggcttcccatacaagcgatagattgtcgcacctgattgcccgacattatcgcgagcccatttatacccatataaatcagcatccatgttggaatttaatcgcggcctcgacgtttcccgttgaatatggctcatactcttcctttttcaatattattgaagcatttatcagggttattgtctcatgagcggatacatatttgaatgtatttagaaaaataaacaaataggggttccgcgcacatttccccgaaaagtgccacctgacgtctaagaaaccattattatcatgacattaacctataaaaataggcgtatcacgaggccctttcgtctcgcgcgtttcggtgatgacggtgaaaacctctgacacatgcagctcccggagacggtcacagcttgtctgtaagcggatgccgggagcagacaagcccgtcagggcgcgtcagcgggtgttggcgggtgtcggggctggcttaactatgcggcatcagagcagattgtactgagagtgcaccatatgcggtgtgaaataccgcacagatgcgtaaggagaaaataccgcatcaggc

SEQ ID NO: 161 - DNA, 145 bp, Artificial Sequence
  Description of Artificial Sequence: Synthetic polynucleotide
ttggccactccctctctgcgcgctcgctcgctcactgaggccgggcgaccaaaggtcgcccgacgcccgggctttgcccgggcggcctcagtgagcgagcgagcgcgcagagagggagtggccaactccatcactaggggttcct

SEQ ID NO: 162 - DNA, 30 bp, Artificial Sequence
  Description of Artificial Sequence: Synthetic oligonucleotide
gagtttaaacttcgtcgaggccgcacgcgt

SEQ ID NO: 163 - DNA, 47 bp, Artificial Sequence
  Description of Artificial Sequence: Synthetic oligonucleotide
ggtaccgagctcggatccactagtaacggccgccagtgtgctggaat

SEQ ID NO: 164 - DNA, 193 bp, Artificial Sequence
  Description of Artificial Sequence: Synthetic polynucleotide
ctgtggcttctagctgcccgggtggcatccctgtgacccctccccagtgcctctcctggccctggaagttgccactccagtgcccaccagccttgtcctaataaaattaagttgcatcattttgtctgactaggtgtccttctataatattatggggtggaggggggtggtatggagcaaggggcaagttggg

SEQ ID NO: 165 - DNA, 145 bp, Artificial Sequence
  Description of Artificial Sequence: Synthetic polynucleotide
aggaacccctagtgatggagttggccactccctctctgcgcgctcgctcgctcactgaggccgggcgaccaaaggtcgcccgacgcccgggctttgcccgggcggcctcagtgagcgagcgagcgcgcagagagggagtggccaa

SEQ ID NO: 166 - DNA, 193 bp, Artificial Sequence; identical to SEQ ID NO: 164
  Description of Artificial Sequence: Synthetic polynucleotide

SEQ ID NO: 167 - DNA, 31 bp, Artificial Sequence
  Description of Artificial Sequence: Synthetic oligonucleotide
cacgtgcggaccgagcggcctaagctcgcga

SEQ ID NO: 168 - DNA, 611 bp, Artificial Sequence
  Description of Artificial Sequence: Synthetic polynucleotide
gtccttcaacgtcgaactgtagcactctggatagctagctagcgtttgtagatagtttcaaggatagcaaccaacaacacgatagtttagaaattgttctagatcttctgctactactcgagagatagttgacttctagaagactctggatagagagcttcctgtggtttctatttcaacacttcgagcgatttagatagaggcgtcaattgagaacaaaaactggacacctgtttctagaacactagtgctagtcttctcaaggcttgatacgtcctgccactcacacacaaaaaaccaacacacagattaatgaaaataaagatcttttattagagagcgagtggatagtttagagtcgcttgagacttatcctgtgtccaactagccaagagtagagagagagtgactaggtggatcgagagatcgtcgtctatttgactgctagcctgtgttctcgtcgtagtccaaatcttcaatactctggcgactagtaacttgaatctgtgtatctaacacgacaaggctactcctttgagtttctagtgataagtgcgactggatctagctagttgagtttctagaaactacgtccaaagctactagcacta

SEQ ID NO: 169 - skipped

SEQ ID NO: 170 - protein, 952 aa, Homo sapiens
MGVRHPPCSHRLLAVCALVSLATAALLGHILLHDFLLVPRELSGSSPVLEETHPAHQQGASRPGPRDAQAHPGRPRAVPTQCDVPPNSRFDCAPDKAITQEQCEARGCCYIPAKQGLQGAQMGQPWCFFPPSYPSYKLENLSSSEMGYTATLTRTTPTFFPKDILTLRLDVMMETENRLHFTIKDPANRRYEVPLETPRVHSRAPSPLYSVEFSEEPFGVIVHRQLDGRVLLNTTVAPLFFADQFLQLSTSLPSQYITGLAEHLSPLMLSTSWTRITLWNRDLAPTPGANLYGSHPFYLALEDGGSAHGVFLLNSNAMDVVLQPSPALSWRSTGGILDVYIFLGPEPKSVVQQYLDVVGYPFMPPYWGLGFHLCRWGYSSTAITRQVVENMTRAHFPLDVQWNDLDYMDSRRDFTFNKDGFRDFPAMVQELHQGGRRYMMIVDPAISSSGPAGSYRPYDEGLRRGVFITNETGQPLIGKVWPGSTAFPDFTNPTALAWWEDMVAEFHDQVPFDGMWIDMNEPSNFIRGSEDGCPNNELENPPYVPGVVGGTLQAATICASSHQFLSTHYNLHNLYGLTEAIASHRALVKARGTRPFVISRSTFAGHGRYAGHWTGDVWSSWEQLASSVPEILQFNLLGVPLVGADVCGFLGNTSEELCVRWTQLGAFYPFMRNHNSLLSLPQEPYSFSEPAQQAMRKALTLRYALLPHLYTLFHQAHVAGETVARPLFLEFPKDSSTWTVDHQLLWGEALLITPVLQAGKAEVTGYFPLGTWYDLQTVPIEALGSLPPPPAAPREPAIHSEGQWVTLPAPLDTINVHLRAGYIIPLQGPGLTTTESRQQPMALAVALTKGGEARGELFWDDGESLEVLERGAYTQVIFLARNNTIVNELVRVTSEGAGLQLQKVTVLGVATAPQQVLSNGVPVSNFTYSPDTKVLDICVSLLMGEQFLVSWC

SEQ ID NO: 171 - protein, 952 aa, Homo sapiens
MGVRHPPCSHRLLAVCALVSLATAALLGHILLHDFLLVPRELSGSSPVLEETHPAHQQGASRPGPRDAQAHPGRPRAVPTQCDVPPNSRFDCAPDKAITQEQCEARGCCYIPAKQGLQGAQMGQPWCFFPPSYPSYKLENLSSSEMGYTATLTRTTPTFFPKDILTLRLDVMMETENRLHFTIKDPANRRYEVPLETPRVLSRAPSPLYSVEFSEEPFGVIVHRQLDGRVLLNTTVAPLFFADQFLQLSTSLPSQYITGLAEHLSPLMLSTSWTRITLWNRDLAPTPGANLYGSHPFYLALEDGGSAHGVFLLNSNAMDVVLQPSPALSWRSTGGILDVYIFLGPEPKSVVQQYLDVVGYPFMPPYWGLGFHLCRWGYSSTAITRQVVENMTRAHFPLDVQWNDLDYMDSRRDFTFNKDGFRDFPAMVQELHQGGRRYMMIVDPAISSSGPAGSYRPYDEGLRRGVFITNETGQPLIGKVWPGSTAFPDFTNPTALAWWEDMVAEFHDQVPFDGMWIDMNEPSNFIRGSEDGCPNNELENPPYVPGVVGGTLQAATICASSHQFLSTHYNLHNLYGLTEAIASHRALVKARGTRPFVISRSTFAGHGRYAGHWTGDVWSSWEQLASSVPEILQFNLLGVPLVGADVCGFLGNTSEELCVRWTQLGAFYPFMRNHNSLLSLPQEPYSFSEPAQQAMRKALTLRYALLPHLYTLFHQAHVAGETVARPLFLEFPKDSSTWTVDHQLLWGEALLITPVLQAGKAEVTGYFPLGTWYDLQTVPIEALGSLPPPPAAPREPAIHSEGQWVTLPAPLDTINVHLRAGYIIPLQGPGLTTTESRQQPMALAVALTKGGEARGELFWDDGESLEVLERGAYTQVIFLARNNTIVNELVRVTSEGAGLQLQKVTVLGVATAPQQVLSNGVPVSNFTYSPDTKVLDICVSLLMGEQFLVSWC

SEQ ID NO: 172 - protein, 945 aa, Homo sapiens
MEFGLSWVFLVALLKGVQCEGHILLHDFLLVPRELSGSSPVLEETHPAHQQGASRPGPRDAQAHPGRPRAVPTQCDVPPNSRFDCAPDKAITQEQCEARGCCYIPAKQGLQGAQMGQPWCFFPPSYPSYKLENLSSSEMGYTATLTRTTPTFFPKDILTLRLDVMMETENRLHFTIKDPANRRYEVPLETPRVHSRAPSPLYSVEFSEEPFGVIVHRQLDGRVLLNTTVAPLFFADQFLQLSTSLPSQYITGLAEHLSPLMLSTSWTRITLWNRDLAPTPGANLYGSHPFYLALEDGGSAHGVFLLNSNAMDVVLQPSPALSWRSTGGILDVYIFLGPEPKSVVQQYLDVVGYPFMPPYWGLGFHLCRWGYSSTAITRQVVENMTRAHFPLDVQWNDLDYMDSRRDFTFNKDGFRDFPAMVQELHQGGRRYMMIVDPAISSSGPAGSYRPYDEGLRRGVFITNETGQPLIGKVWPGSTAFPDFTNPTALAWWEDMVAEFHDQVPFDGMWIDMNEPSNFIRGSEDGCPNNELENPPYVPGVVGGTLQAATICASSHQFLSTHYNLHNLYGLTEAIASHRALVKARGTRPFVISRSTFAGHGRYAGHWTGDVWSSWEQLASSVPEILQFNLLGVPLVGADVCGFLGNTSEELCVRWTQLGAFYPFMRNHNSLLSLPQEPYSFSEPAQQAMRKALTLRYALLPHLYTLFHQAHVAGETVARPLFLEFPKDSSTWTVDHQLLWGEALLITPVLQAGKAEVTGYFPLGTWYDLQTVPIEALGSLPPPPAAPREPAIHSEGQWVTLPAPLDTINVHLRAGYIIPLQGPGLTTTESRQQPMALAVALTKGGEARGELFWDDGESLEVLERGAYTQVIFLARNNTIVNELVRVTSEGAGLQLQKVTVLGVATAPQQVLSNGVPVSNFTYSPDTKVLDICVSLLMGEQFLVSWC

SEQ ID NO: 173 - protein, 945 aa, Homo sapiens
MYRMQLLSCIALSLALVTNSGHILLHDFLLVPRELSGSSPVLEETHPAHQQGASRPGPRDAQAHPGRPRAVPTQCDVPPNSRFDCAPDKAITQEQCEARGCCYIPAKQGLQGAQMGQPWCFFPPSYPSYKLENLSSSEMGYTATLTRTTPTFFPKDILTLRLDVMMETENRLHFTIKDPANRRYEVPLETPRVHSRAPSPLYSVEFSEEPFGVIVHRQLDGRVLLNTTVAPLFFADQFLQLSTSLPSQYITGLAEHLSPLMLSTSWTRITLWNRDLAPTPGANLYGSHPFYLALEDGGSAHGVFLLNSNAMDVVLQPSPALSWRSTGGILDVYIFLGPEPKSVVQQYLDVVGYPFMPPYWGLGFHLCRWGYSSTAITRQVVENMTRAHFPLDVQWNDLDYMDSRRDFTFNKDGFRDFPAMVQELHQGGRRYMMIVDPAISSSGPAGSYRPYDEGLRRGVFITNETGQPLIGKVWPGSTAFPDFTNPTALAWWEDMVAEFHDQVPFDGMWIDMNEPSNFIRGSEDGCPNNELENPPYVPGVVGGTLQAATICASSHQFLSTHYNLHNLYGLTEAIASHRALVKARGTRPFVISRSTFAGHGRYAGHWTGDVWSSWEQLASSVPEILQFNLLGVPLVGADVCGFLGNTSEELCVRWTQLGAFYPFMRNHNSLLSLPQEPYSFSEPAQQAMRKALTLRYALLPHLYTLFHQAHVAGETVARPLFLEFPKDSSTWTVDHQLLWGEALLITPVLQAGKAEVTGYFPLGTWYDLQTVPIEALGSLPPPPAAPREPAIHSEGQWVTLPAPLDTINVHLRAGYIIPLQGPGLTTTESRQQPMALAVALTKGGEARGELFWDDGESLEVLERGAYTQVIFLARNNTIVNELVRVTSEGAGLQLQKVTVLGVATAPQQVLSNGVPVSNFTYSPDTKVLDICVSLLMGEQFLVSWC

SEQ ID NO: 174 - protein, 945 aa, Artificial Sequence
  Description of Artificial Sequence: Synthetic polypeptide
MYRMQLLLLIALSLALVTNSGHILLHDFLLVPRELSGSSPVLEETHPAHQQGASRPGPRDAQAHPGRPRAVPTQCDVPPNSRFDCAPDKAITQEQCEARGCCYIPAKQGLQGAQMGQPWCFFPPSYPSYKLENLSSSEMGYTATLTRTTPTFFPKDILTLRLDVMMETENRLHFTIKDPANRRYEVPLETPRVHSRAPSPLYSVEFSEEPFGVIVHRQLDGRVLLNTTVAPLFFADQFLQLSTSLPSQYITGLAEHLSPLMLSTSWTRITLWNRDLAPTPGANLYGSHPFYLALEDGGSAHGVFLLNSNAMDVVLQPSPALSWRSTGGILDVYIFLGPEPKSVVQQYLDVVGYPFMPPYWGLGFHLCRWGYSSTAITRQVVENMTRAHFPLDVQWNDLDYMDSRRDFTFNKDGFRDFPAMVQELHQGGRRYMMIVDPAISSSGPAGSYRPYDEGLRRGVFITNETGQPLIGKVWPGSTAFPDFTNPTALAWWEDMVAEFHDQVPFDGMWIDMNEPSNFIRGSEDGCPNNELENPPYVPGVVGGTLQAATICASSHQFLSTHYNLHNLYGLTEAIASHRALVKARGTRPFVISRSTFAGHGRYAGHWTGDVWSSWEQLASSVPEILQFNLLGVPLVGADVCGFLGNTSEELCVRWTQLGAFYPFMRNHNSLLSLPQEPYSFSEPAQQAMRKALTLRYALLPHLYTLFHQAHVAGETVARPLFLEFPKDSSTWTVDHQLLWGEALLITPVLQAGKAEVTGYFPLGTWYDLQTVPIEALGSLPPPPAAPREPAIHSEGQWVTLPAPLDTINVHLRAGYIIPLQGPGLTTTESRQQPMALAVALTKGGEARGELFWDDGESLEVLERGAYTQVIFLARNNTIVNELVRVTSEGAGLQLQKVTVLGVATAPQQVLSNGVPVSNFTYSPDTKVLDICVSLLMGEQFLVSWC

SEQ ID NO: 175 - protein, 27 aa, Homo sapiens
MGVRHPPCSHRLLAVCALVSLATAALL

SEQ ID NO: 176 - protein, 20 aa, Homo sapiens
MEFGLSWVFLVALLKGVQCE

SEQ ID NO: 177 - DNA, 60 bp, Artificial Sequence
  Description of Artificial Sequence: Synthetic oligonucleotide
atggagttcgggctgagctgggtctttctggtggccctgctgaagggagtccagtgcgag

SEQ ID NO: 178 - protein, 20 aa, Artificial Sequence
  Description of Artificial Sequence: Synthetic peptide
MYRMQLLSCIALSLALVTNS

SEQ ID NO: 179 - DNA, 60 bp, Artificial Sequence
  Description of Artificial Sequence: Synthetic oligonucleotide
atgtaccgtatgcagctgctgtcctgcatcgcactgtcactggcactggttaccaactca

SEQ ID NO: 180 - protein, 20 aa, Artificial Sequence
  Description of Artificial Sequence: Synthetic peptide
MYRMQLLLLIALSLALVTNS

SEQ ID NO: 181 - DNA, 60 bp, Artificial Sequence
  Description of Artificial Sequence: Synthetic oligonucleotide
atgtaccgtatgcagctgctgctgctgatcgcactgtcactggcactggttaccaactca

SEQ ID NO: 182 - DNA, 2868 bp, Homo sapiens
atgggagtgaggcacccgccctgctcccaccggctcctggccgtctgcgccctcgtgtccttggcaaccgctgcactcctggggcacatcctactccatgatttcctgctggttccccgagagctgagtggctcctccccagtcctggaggagactcacccagctcaccagcagggagccagcagaccagggccccgggacgcccaggcacaccccggccgtcccagagcagtgcccacacagtgcgacgtcccccccaacagccgcttcgattgcgcccctgacaaggccatcacccaggaacagtgcgaggcccgcggctgctgctacatccctgcaaagcaggggctgcagggagcccagatggggcagccctggtgcttcttcccacccagctaccccagctacaagctggagaacctgagctcctctgaaatgggctacacggccaccctgacccgtaccacccccaccttcttccccaaggacatcctgaccctgcggctggacgtgatgatggagactgagaaccgcctccacttcacgatcaaagatccagctaacaggcgctacgaggtgcccttggagaccccgcgtgtccacagccgggcaccgtccccactctacagcgtggagttctccgaggagcccttcggggtgatcgtgcaccggcagctggacggccgcgtgctgctgaacacgacggtggcgcccctgttctttgcggaccagttccttcagctgtccacctcgctgccctcgcagtatatcacaggcctcgccgagcacctcagtcccctgatgctcagcaccagctggaccaggatcaccctgtggaaccgggaccttgcgcccacgcccggtgcgaacctctacgggtctcaccctttctacctggcgctggaggacggcgggtcggcacacggggtgttcctgctaaacagcaacgccatggacgtggtcctgcagccgagccctgcccttagctggaggtcgacaggtgggatcctggacgtctacatcttcctgggcccagagcccaagagcgtggtgcagcagtacctggacgtggtgggatacccgttcatgccgccatactggggcctgggcttccacctgtgccgctggggctactcctccaccgctatcacccgccaggtggtggagaacatgaccagggcccacttccccctggacgtccagtggaacgatctggactacatggactcccggagggacttcacgttcaacaaggatggcttccgggacttcccggccatggtgcaggagctgcaccagggcggccggcgctacatgatgatcgtggatcctgccatcagcagctcgggccctgccgggagctacaggccctacgacgagggtctgcggaggggggttttcatcaccaacgagaccggccagccgctgattgggaaggtgtggcccgggtccactgccttccccgacttcaccaaccccacagccctggcctggtgggaggacatggtggctgagttccatgaccaggtgcccttcgacggcatgtggattgacatgaacgagccttccaacttcatcagaggctctgaggacggctgccccaacaacgagctggagaacccaccctacgtgcctggggtggttggggggaccctccaggcggccaccatctgtgcctccagccaccagtttctctccacacactacaacctgcacaacctctacggcctgaccgaagccatcgcctcccacagggcgctggtgaaggctcgggggacacgcccatttgtgatctcccgctcgacctttgctggccacggccgatacgccggccactggacgggggacgtgtggagctcctgggagcagctcgcctcctccgtgccagaaatcctgcagtttaacctgctgggggtgcctctggtcggggccgacgtctgcggcttcctgggcaacacctcagaggagctgtgtgtgcgctggacccagctgggggccttctaccccttcatgcggaaccacaacagcctgctcagtctgccccaggagccgtacagcttcagcgagccggcccagcaggccatgaggaaggccctcaccctgcgctacgcactcctcccccacctctacacactgttccaccaggcccacgtcgcgggggagaccgtggcccggcccctcttcctggagttccccaaggactctagcacctggactgtggaccaccagctcctgtggggggaggccctgctcatcaccccagtgctccaggccgggaaggccgaagtgactggctacttccccttgggcacatggtacgacctgcagacggtgccaatagaggcccttggcagcctcccacccccacctgcagctccccgtgagccagccatccacagcgaggggcagtgggtgacgctgccggcccccctggacaccatcaacgtgcacctccgggctgggtacatcatccccctgcagggccctggcctcacaaccacagagtcccgccagcagcccatggccctggctgtggccctgaccaagggtggagaggcccgaggggagctgttctgggacgacggagagagcctggaagtgctggagcgaggggcctacacacaggtcatcttcctggccaggaataacacgatcgtgaatgagctggtacgtgtgaccagtgagggagctggcctgcagctgcagaaggtgactgtcctgggcgtggccacggcgccccagcaggtcctctccaacggtgtccctgtctccaacttcacctacagccccgacaccaaggtcctggacatctgtgtctcgctgttgatgggagagcagtttctcgtcagctggtgttgataactcgag

SEQ ID NO: 183-184 - skipped (2 entries)

SEQ ID NO: 185 - protein, 677 aa, Homo sapiens
MPGFLVRILPLLLVLLLLGPTRGLRNATQRMFEIDYSRDSFLKDGQPFRYISGSIHYSRVPRFYWKDRLLKMKMAGLNAIQTYVPWNFHEPWPGQYQFSEDHDVEYFLRLAHELGLLVILRPGPYICAEWEMGGLPAWLLEKESILLRSSDPDYLAAVDKWLGVLLPKMKPLLYQNGGPVITVQVENEYGSYFACDFDYLRFLQKRFRHHLGDDVVLFTTDGAHKTFLKCGALQGLYTTVDFGTGSNITDAFLSQRKCEPKGPLINSEFYTGWLDHWGQPHSTIKTEAVASSLYDILARGASVNLYMFIGGTNFAYWNGANSPYAAQPTSYDYDAPLSEAGDLTEKYFALRNIIQKFEKVPEGPIPPSTPKFAYGKVTLEKLKTVGAALDILCPSGPIKSLYPLTFIQVKQHYGFVLYRTTLPQDCSNPAPLSSPLNGVHDRAYVAVDGIPQGVLERNNVITLNITGKAGATLDLLVENMGRVNYGAYINDFKGLVSNLTLSSNILTDWTIFPLDTEDAVCSHLGGWGHRDSGHHDEAWAHNSSNYTLPAFYMGNFSIPSGIPDLPQDTFIQFPGWTKGQVWINGFNLGRYWPARGPQLTLFVPQHILMTSAPNTITVLELEWAPCSSDDPELCAVTFVDRPVIGSSVTYDHPSKPVEKRLMPPPPQKNKDSWLDHV

SEQ ID NO: 186 - protein, 529 aa, Homo sapiens
MTSSRLWFSLLLAAAFAGRATALWPWPQNFQTSDQRYVLYPNNFQFQYDVSSAAQPGCSVLDEAFQRYRDLLFGSGSWPRPYLTGKRHTLEKNVLVVSVVTPGCNQLPTLESVENYTLTINDDQCLLLSETVWGALRGLETFSQLVWKSAEGTFFINKTEIEDFPRFPHRGLLLDTSRHYLPLSSILDTLDVMAYNKLNVFHWHLVDDPSFPYESFTFPELMRKGSYNPVTHIYTAQDVKEVIEYARLRGIRVLAEFDTPGHTLSWGPGIPGLLTPCYSGSEPSGTFGPVNPSLNNTYEFMSTFFLEVSSVFPDFYLHLGGDEVDFTCWKSNPEIQDFMRKKGFGEDFKQLESFYIQTLLDIVSSYGKGYVVWQEVFDNKVKIQPDTIIQVWREDIPVNYMKELELVTKAGFRALLSAPWYLNRISYGPDWKDFYIVEPLAFEGTPEQKALVIGGEACMWGEYVDNTNLVPRLWPRAGAVAERLWSNKLTSDLTFAYERLSHFRCELLRRGVQAQPLNVGFCEQEFEQT

SEQ ID NO: 187 - protein, 556 aa, Homo sapiens
MELCGLGLPRPPMLLALLLATLLAAMLALLTQVALVVQVAEAARAPSVSAKPGPALWPLPLLVKMTPNLLHLAPENFYISHSPNSTAGPSCTLLEEAFRRYHGYIFGFYKWHHEPAEFQAKTQVQQLLVSITLQSECDAFPNISSDESYTLLVKEPVAVLKANRVWGALRGLETFSQLVYQDSYGTFTINESTIIDSPRFSHRGILIDTSRHYLPVKIILKTLDAMAFNKFNVLHWHIVDDQSFPYQSITFPELSNKGSYSLSHVYTPNDVRMVIEYARLRGIRVLPEFDTPGHTLSWGKGQKDLLTPCYSRQNKLDSFGPINPTLNTTYSFLTTFFKEISEVFPDQFIHLGGDEVEFKCWESNPKIQDFMRQKGFGTDFKKLESFYIQKVLDIIATINKGSIVWQEVFDDKAKLAPGTIVEVWKDSAYPEELSRVTASGFPVILSAPWYLDLISYGQDWRKYYKVEPLDFGGTQKQKQLFIGGEACLWGEYVDATNLTPRLWPRASAVGERLWSSKDVRDMDDAYDRLTRHRCRMVERGIAAQPLYAGYCNHENM

SEQ ID NO: 188 - protein, 429 aa, Homo sapiens
MQLRNPELHLGCALALRFLALVSWDIPGARALDNGLARTPTMGWLHWERFMCNLDCQEEPDSCISEKLFMEMAELMVSEGWKDAGYEYLCIDDCWMAPQRDSEGRLQADPQRFPHGIRQLANYVHSKGLKLGIYADVGNKTCAGFPGSFGYYDIDAQTFADWGVDLLKFDGCYCDSLENLADGYKHMSLALNRTGRSIVYSCEWPLYMWPFQKPNYTEIRQYCNHWRNFADIDDSWKSIKSILDWTSFNQERIVDVAGPGGWNDPDMLVIGNFGLSWNQQVTQMALWAIMAAPLFMSNDLRHISPQAKALLQDKDVIAINQDPLGKQGYQLRQGDNFEVWERPLSGLAWAVAMINRQEIGGPRSYTIAVASLGKGVACNPACFITQLLPVKRKLGFYEWTSRLRSHINPTGTVLLQLENTMQMSLKDLL

SEQ ID NO: 189 - protein, 536 aa, Homo sapiens
MEFSSPSREECPKPLSRVSIMAGSLTGLLLLQAVSWASGARPCIPKSFGYSSVVCVCNATYCDSFDPPTFPALGTFSRYESTRSGRRMELSMGPIQANHTGTGLLLTLQPEQKFQKVKGFGGAMTDAAALNILALSPPAQNLLLKSYFSEEGIGYNIIRVPMASCDFSIRTYTYADTPDDFQLHNFSLPEEDTKLKIPLIHRALQLAQRPVSLLASPWTSPTWLKTNGAVNGKGSLKGQPGDIYHQTWARYFVKFLDAYAEHKLQFWAVTAENEPSAGLLSGYPFQCLGFTPEHQRDFIARDLGPTLANSTHHNVRLLMLDDQRLLLPHWAKVVLTDPEAAKYVHGIAVHWYLDFLAPAKATLGETHRLFPNTMLFASEACVGSKFWEQSVRLGSWDRGMQYSHSIITNLLYHVVGWTDWNLALNPEGGPNWVRNFVDSPIIVDITKDTFYKQPMFYHLGHFSKFIPEGSQRVGLVASQKNDLDAVALMHPDGSAVVVVLNRSSKDVPLTIKDPAVGFLETISPGYSIHTYLWRRQ

SEQ ID NO: 190 - protein, 509 aa, Homo sapiens
MSMGAPRSLLLALAAGLAVARPPNIVLIFADDLGYGDLGCYGHPSSTTPNLDQLAAGGLRFTDFYVPVSLCTPSRAALLTGRLPVRMGMYPGVLVPSSRGGLPLEEVTVAEVLAARGYLTGMAGKWHLGVGPEGAFLPPHQGFHRFLGIPYSHDQGPCQNLTCFPPATPCDGGCDQGLVPIPLLANLSVEAQPPWLPGLEARYMAFAHDLMADAQRQDRPFFLYYASHHTHYPQFSGQSFAERSGRGPFGDSLMELDAAVGTLMTAIGDLGLLEETLVIFTADNGPETMRMSRGGCSGLLRCGKGTTYEGGVREPALAFWPGHIAPGVTHELASSLDLLPTLAALAGAPLPNVTLDGFDLSPLLLGTGKSPRQSLFFYPSYPDEVRGVFAVRTGKYKAHFFTQGSAHSDTTADPACHASSSLTAHEPPLLYDLSKDPGENYNLLGGVAGATPEVLQALKQLQLLKAQLDAAVTFGPSQVARGEDPALQICCHPGCTPRPACCHCPDPHA

SEQ ID NO: 191 - protein, 685 aa, Homo sapiens
MAEWLLSASWQRRAKAMTAAAGSAGRAAVPLLLCALLAPGGAYVLDDSDGLGREFDGIGAVSGGGATSRLLVNYPEPYRSQILDYLFKPNFGASLHILKVEIGGDGQTTDGTEPSHMHYALDENYFRGYEWWLMKEAKKRNPNITLIGLPWSFPGWLGKGFDWPYVNLQLTAYYVVTWIVGAKRYHDLDIDYIGIWNERSYNANYIKILRKMLNYQGLQRVKIIASDNLWESISASMLLDAELFKVVDVIGAHYPGTHSAKDAKLTGKKLWSSEDFSTLNSDMGAGCWGRILNQNYINGYMTSTIAWNLVASYYEQLPYGRCGLMTAQEPWSGHYVVESPVWVSAHTTQFTQPGWYYLKTVGHLEKGGSYVALTDGLGNLTIIIETMSHKHSKCIRPFLPYFNVSQQFATFVLKGSFSEIPELQVWYTKLGKTSERFLFKQLDSLWLLDSDGSFTLSLHEDELFTLTTLTTGRKGSYPLPPKSQPFPSTYKDDFNVDYPFFSEAPNFADQTGVFEYFTNIEDPGEHHFTLRQVLNQRPITWAADASNTISIIGDYNWTNLTIKCDVYIETPDTGGVFIAGRVNKGGILIRSARGIFFWIFANGSYRVTGDLAGWIIYALGRVEVTAKKWYTLTLTIKGHFTSGMLNDKSLWTDIPVNFPKNGWAAIGTHSFEFAQFDNFLVEATR

SEQ ID NO: 192 - protein, 631 aa, Homo sapiens
MPRYGASLRQSCPRSGREQGQDGTAGAPGLLWMGLVLALALALALALALSDSRVLWAPAEAHPLSPQGHPARLHRIVPRLRDVFGWGNLTCPICKGLFTAINLGLKKEPNVARVGSVAIKLCNLLKIAPPAVCQSIVHLFEDDMVEVWRRSVLSPSEACGLLLGSTCGHWDIFSSWNISLPTVPKPPPKPPSPPAPGAPVSRILFLTDLHWDHDYLEGTDPDCADPLCCRRGSGLPPASRPGAGYWGEYSKCDLPLRTLESLLSGLGPAGPFDMVYWTGDIPAHDVWHQTRQDQLRALTTVTALVRKFLGPVPVYPAVGNHESTPVNSFPPPFIEGNHSSRWLYEAMAKAWEPWLPAEALRTLRIGGFYALSPYPGLRLISLNMNFCSRENFWLLINSTDPAGQLQWLVGELQAAEDRGDKVHIIGHIPPGHCLKSWSWNYYRIVARYENTLAAQFFGHTHVDEFEVFYDEETLSRPLAVAFLAPSATTYIGLNPGYRVYQIDGNYSGSSHVVLDHETYILNLTQANIPGAIPHWQLLYRARETYGLPNTLPTAWHNLVYRMRGDMQLFQTFWFLYHKGHPPSEPCGTPCRLATLCAQLSARADSPALCRHLMPDGSLPEAQSLWPRPLFC

SEQ ID NO: 193 - protein, 1278 aa, Homo sapiens
MTARGLALGLLLLLLCPAQVFSQSCVWYGECGIAYGDKRYNCEYSGPPKPLPKDGYDLVQELCPGFFFGNVSLCCDVRQLQTLKDNLQLPLQFLSRCPSCFYNLLNLFCELTCSPRQSQFLNVTATEDYVDPVTNQTKTNVKELQYYVGQSFANAMYNACRDVEAPSSNDKALGLLCGKDADACNATNWIEYMFNKDNGQAPFTITPVFSDFPVHGMEPMNNATKGCDESVDEVTAPCSCQDCSIVCGPKPQPPPPPAPWTILGLDAMYVIMWITYMAFLLVFFGAFFAVWCYRKRYFVSEYTPIDSNIAFSVNASDKGEASCCDPVSAAFEGCLRRLFTRWGSFCVRNPGCVIFFSLVFITACSSGLVFVRVTTNPVDLWSAPSSQARLEKEYFDQHFGPFFRTEQLIIRAPLTDKHIYQPYPSGADVPFGPPLDIQILHQVLDLQIAIENITASYDNETVTLQDICLAPLSPYNTNCTILSVLNYFQNSHSVLDHKKGDDFFVYADYHTHFLYCVRAPASLNDTSLLHDPCLGTFGGPVFPWLVLGGYDDQNYNNATALVITFPVNNYYNDTEKLQRAQAWEKEFINFVKNYKNPNLTISFTAERSIEDELNRESDSDVFTVVISYAIMFLYISLALGHMKSCRRLLVDSKVSLGIAGILIVLSSVACSLGVFSYIGLPLTLIVIEVIPFLVLAVGVDNIFILVQAYQRDERLQGETLDQQLGRVLGEVAPSMFLSSFSETVAFFLGALSVMPAVHTFSLFAGLAVFIDFLLQITCFVSLLGLDIKRQEKNRLDIFCCVRGAEDGTSVQASESCLFRFFKNSYSPLLLKDWMRPIVIAIFVGVLSFSIAVLNKVDIGLDQSLSMPDDSYMVDYFKSISQYLHAGPPVYFVLEEGHDYTSSKGQNMVCGGMGCNNDSLVQQIFNAAQLDNYTRIGFAPSSWIDDYFDWVKPQSSCCRVDNITDQFCNASVVDPACVRCRPLTPEGKQRPQGGDFMRFLPMFLSDNPNPKCGKGGHAAYSSAVNILLGHGTRVGATYFMTYHTVLQTSADFIDALKKARLIASNVTETMGINGSAYRVFPYSVFYVFYEQYLTIIDDTIFNLGVSLGAIFLVTMVLLGCELWSAVIMCATIAMVLVNMFGVMWLWGISLNAVSLVNLVMSCGISVEFCSHITRAFTVSMKGSRVERAEEALAHMGSSVFSGITLTKFGGIVVLAFAKSQIFQIFYFRMYLAMVLLGATHGLIFLPVLLSYIGPSVNKAKSCATEERYKGTERERLLNF

SEQ ID NO: 194 - protein, 151 aa, Homo sapiens
MRFLAATFLLLALSTAAQAEPVQFKDCGSVDGVIKEVNVSPCPTQPCQLSKGQSYSVNVTFTSNIQSKSSKAVVHGILMGVPVPFPIPEPDGCKSGINCPIQKDKTYSYLNKLPVKSEYPSIKLVVEWQLQDDKNQSLFCWEIPVQIVSHL

SEQ ID NO: 195 - protein, 392 aa, Homo sapiens
MNCCIGLGEKARGSHRASYPSLSALFTEASILGFGSFAVKAQWTEDCRKSTYPPSGPTYRGAVPWYTINLDLPPYKRWHELMLDKAPVLKVIVNSLKNMINTFVPSGKIMQVVDEKLPGLLGNFPGPFEEEMKGIAAVTDIPLGEIISFNIFYELFTICTSIVAEDKKGHLIHGRNMDFGVFLGWNINNDTWVITEQLKPLTVNLDFQRNNKTVFKASSFAGYVGMLTGFKPGLFSLTLNERFSINGGYLGILEWILGKKDVMWIGFLTRTVLENSTSYEEAKNLLTKTKILAPAYFILGGNQSGEGCVITRDRKESLDVYELDAKQGRWYVVQTNYDRWKHPFFLDDRRTPAKMCLNRTSQENISFETMYDVLSTKPVLNKLTVYTTLIDV

SEQ ID NO: 196 - protein, 399 aa, Homo sapiens
MKMRFLGLVVCLVLWTLHSEGSGGKLTAVDPETNMNVSEIISYWGFPSEEYLVETEDGYILCLNRIPHGRKNHSDKGPKPVVFLQHGLLADSSNWVTNLANSSLGFILADAGFDVWMGNSRGNTWSRKHKTLSVSQDEFWAFSYDEMAKYDLPASINFILNKTGQEQVYYVGHSQGTTIGFIAFSQIPELAKRIKMFFALGPVASVAFCTSPMAKLGRLPDHLIKDLFGDKEFLPQSAFLKWLGTHVCTHVILKELCGNLCFLLCGFNERNLNMSRVDVYTTHSPAGTSVQNMLHWSQAVKFQKFQAFDWGSSAKNYFHYNQSYPPTYNVKDMLVPTAVWSGGHDWLADVYDVNILLTQITNLVFHESIPEWEHLDFIWGLDAPWRLYNKIINLMRKYQ

SEQ ID NO: 197 - protein, 653 aa, Homo sapiens
MRPLRPRAALLALLASLLAAPPVAPAEAPHLVHVDAARALWPLRRFWRSTGFCPPLPHSQADQYVLSWDQQLNLAYVGAVPHRGIKQVRTHWLLELVTTRGSTGRGLSYNFTHLDGYLDLLRENQLLPGFELMGSASGHFTDFEDKQQVFEWKDLVSSLARRYIGRYGLAHVSKWNFETWNEPDHHDFDNVSMTMQGFLNYYDACSEGLRAASPALRLGGPGDSFHTPPRSPLSWGLLRHCHDGTNFFTGEAGVRLDYISLHRKGARSSISILEQEKVVAQQIRQLFPKFADTPIYNDEADPLVGWSLPQPWRADVTYAAMVVKVIAQHQNLLLANTTSAFPYALLSNDNAFLSYHPHPFAQRTLTARFQVNNTRPPHVQLLRKPVLTAMGLLALLDEEQLWAEVSQAGTVLDSNHTVGVLASAHRPQGPADAWRAAVLIYASDDTRAHPNRSVAVTLRLRGVPPGPGLVYVTRYLDNGLCSPDGEWRRLGRPVFPTAEQFRRMRAAEDPVAAAPRPLPAGGRLTLRPALRLPSLLLVHVCARPEKPPGQVTRLRALPLTQGQLVLVWSDEHVGSKCLWTYEIQFSQDGKAYTPVSRKPSTFNLFVFSPDTGAVSGSYRVRALDYWARPGPFSDPVPYLEVPVPRGPPSPGNP

SEQ ID NO: 198 - protein, 550 aa, Homo sapiens
MPPPRTGRGLLWLGLVLSSVCVALGSETQANSTTDALNVLLIIVDDLRPSLGCYGDKLVRSPNIDQLASHSLLFQNAFAQQAVCAPSRVSFLTGRRPDTTRLYDFNSYWRVHAGNFSTIPQYFKENGYVTMSVGKVFHPGISSNHTDDSPYSWSFPPYHPSSEKYENTKTCRGPDGELHANLLCPVDVLDVPEGTLPDKQSTEQAIQLLEKMKTSASPFFLAVGYHKPHIPFRYPKEFQKLYPLENITLAPDPEVPDGLPPVAYNPWMDIRQREDVQALNISVPYGPIPVDFQRKIRQSYFASVSYLDTQVGRLLSALDDLQLANSTIIAFTSDHGWALGEHGEWAKYSNFDVATHVPLIFYVPGRTASLPEAGEKLFPYLDPFDSASQLMEPGRQSMDLVELVSLFPTLAGLAGLQVPPRCPVPSFHVELCREGKNLLKHFRFRDLEEDPYLPGNPRELIAYSQYPRPSDIPQWNSDKPSLKDIKIMGYSIRTIDYRYTVWVGFNPDEFLANFSDIHAGELYFVDSDPLQDHNMYNDSQGGDLFQLLMP

SEQ ID NO: 199 - protein, 502 aa, Homo sapiens
MSCPVPACCALLLVLGLCRARPRNALLLLADDGGFESGAYNNSAIATPHLDALARRSLLFRNAFTSVSSCSPSRASLLTGLPQHQNGMYGLHQDVHHFNSFDKVRSLPLLLSQAGVRTGIIGKKHVGPETVYPFDFAYTEENGSVLQVGRNITRIKLLVRKFLQTQDDRPFFLYVAFHDPHRCGHSQPQYGTFCEKFGNGESGMGRIPDWTPQAYDPLDVLVPYFVPNTPAARADLAAQYTTVGRMDQGVGLVLQELRDAGVLNDTLVIFTSDNGIPFPSGRTNLYWPGTAEPLLVSSPEHPKRWGQVSEAYVSLLDLTPTILDWFSIPYPSYAIFGSKTIHLTGRSLLPALEAEPLWATVFGSQSHHEVTMSYPMRSVQHRHFRLVHNLNFKMPFPIDQDFYVSPTFQDLLNRTTAGQPTGWYKDLRHYYYRARWELYDRSRDPHETQNLATDPRFAQLLEMLRDQLAKWQWETHDPWVCAPDGVLEEKLSPQCQPLHNEL

SEQ ID NO: 200 - protein, 743 aa, Homo sapiens
MEAVAVAAAVGVLLLAGAGGAAGDEAREAAAVRALVARLLGPGPAADFSVSVERALAAKPGLDTYSLGGGGAARVRVRGSTGVAAAAGLHRYLRDFCGCHVAWSGSQLRLPRPLPAVPGELTEATPNRYRYYQNVCTQSYSFVWWDWARWEREIDWMALNGINLALAWSGQEAIWQRVYLALGLTQAEINEFFTGPAFLAWGRMGNLHTWDGPLPPSWHIKQLYLQHRVLDQMRSFGMTPVLPAFAGHVPEAVTRVFPQVNVTKMGSWGHFNCSYSCSFLLAPEDPIFPIIGSLFLRELIKEFGTDHIYGADTFNEMQPPSSEPSYLAAATTAVYEAMTAVDTEAVWLLQGWLFQHQPQFWGPAQIRAVLGAVPRGRLLVLDLFAESQPVYTRTASFQGQPFIWCMLHNFGGNHGLFGALEAVNGGPEAARLFPNSTMVGTGMAPEGISQNEVVYSLMAELGWRKDPVPDLAAWVTSFAARRYGVSHPDAGAAWRLLLRSVYNCSGEACRGHNRSPLVRRPSLQMNTSIWYNRSDVFEAWRLLLTSAPSLATSPAFRYDLLDLTRQAVQELVSLYYEEARSAYLSKELASLLRAGGVLAYELLPALDEVLASDSRFLLGSWLEQARAAAVSEAEADFYEQNSRYQLTLWGPEGNILDYANKQLAGLVANYYTPRWRLFLEALVDSVAQGIPFQQHQFDKNVFQLEQAFVLSKQRYPSQPRGDTVDLAKKIFLKYYPRWVAGSW

SEQ ID NO: 201 - protein, 635 aa, Homo sapiens
MSGAGRALAALLLAASVLSAALLAPGGSSGRDAQAAPPRDLDKKRHAELKMDQALLLIHNELLWTNLTVYWKSECCYHCLFQVLVNVPQSPKAGKPSAAAASVSTQHGSILQLNDTLEEKEVCRLEYRFGEFGNYSLLVKNIHNGVSEIACDLAVNEDPVDSNLPVSIAFLIGLAVIIVISFLRLLLSLDDFNNWISKAISSRETDRLINSELGSPSRTDPLDGDVQPATWRLSALPPRLRSVDTFRGIALILMVFVNYGGGKYWYFKHASWNGLTVADLVFPWFVFIMGSSIFLSMTSILQRGCSKFRLLGKIAWRSFLLICIGIIIVNPNYCLGPLSWDKVRIPGVLQRLGVTYFVVAVLELLFAKPVPEHCASERSCLSLRDITSSWPQWLLILVLEGLWLGLTFLLPVPGCPTGYLGPGGIGDFGKYPNCTGGAAGYIDRLLLGDDHLYQHPSSAVLYHTEVAYDPEGILGTINSIVMAFLGVQAGKILLYYKARTKDILIRFTAWCCILGLISVALTKVSENEGFIPVNKNLWSLSYVTTLSSFAFFILLVLYPVVDVKGLWTGTPFFYPGMNSILVYVGHEVFENYFPFQWKLKDNQSHKEHLTQNIVATALWVLIAYILYRKKIFWKI

SEQ ID NO: 202 - protein, 552 aa, Homo sapiens
MRLLPLAPGRLRRGSPRHLPSCSPALLLLVLGGCLGVFGVAAGTRRPNVVLLLTDDQDEVLGGMTPLKKTKALIGEMGMTFSSAYVPSALCCPSRASILTGKYPHNHHVVNNTLEGNCSSKSWQKIQEPNTFPAILRSMCGYQTFFAGKYLNEYGAPDAGGLEHVPLGWSYWYALEKNSKYYNYTLSINGKARKHGENYSVDYLTDVLANVSLDFLDYKSNFEPFFMMIATPAPHSPWTAAPQYQKAFQNVFAPRNKNFNIHGTNKHWLIRQAKTPMTNSSIQFLDNAFRKRWQTLLSVDDLVEKLVKRLEFTGELNNTYIFYTSDNGYHTGQFSLPIDKRQLYEFDIKVPLLVRGPGIKPNQTSKMLVANIDLGPTILDIAGYDLNKTQMDGMSLLPILRGASNLTWRSDVLVEYQGEGRNVTDPTCPSLSPGVSQCFPDCVCEDAYNNTYACVRTMSALWNLQYCEFDDQEVFVEVYNLTADPDQITNIAKTIDPELLGKMNYRLMMLQSCSGPTCRTPGVFDPGYRFDPRLMFSNRGSVRTRRFSKHLL

SEQ ID NO: 203 - protein, 522 aa, Homo sapiens
MAAVVAATRWWQLLLVLSAAGMGASGAPQPPNILLLLMDDMGWGDLGVYGEPSRETPNLDRMAAEGLLFPNFYSANPLCSPSRAALLTGRLPIRNGFYTTNAHARNAYTPQEIVGGIPDSEQLLPELLKKAGYVSKIVGKWHLGHRPQFHPLKHGFDEWFGSPNCHFGPYDNKARPNIPVYRDWEMVGRYYEEFPINLKTGEANLTQIYLQEALDFIKRQARHHPFFLYWAVDATHAPVYASKPFLGTSQRGRYGDAVREIDDSIGKILELLQDLHVADNTFVFFTSDNGAALISAPEQGGSNGPFLCGKQTTFEGGMREPALAWWPGHVTAGQVSHQLGSIMDLFTTSLALAGLTPPSDRAIDGLNLLPTLLQGRLMDRPIFYYRGDTLMAATLGQHKAHFWTWTNSWENFRQGIDFCPGQNVSGVTTHNLEDHTKLPLIFHLGRDPGERFPLSFASAEYQEALSRITSVVQQHQEALVPAQPQLNVCNWAVMNWAPPGCEKLGKCLTPPESIPKKCLWSH

SEQ ID NO: 204 - protein, 533 aa, Homo sapiens
MGPRGAASLPRGPGPRRLLLPVVLPLLLLLLLAPPGSGAGASRPPHLVFLLADDLGWNDVGFHGSRIRTPHLDALAAGGVLLDNYYTQPLCTPSRSQLLTGRYQIRTGLQHQIIWPCQPSCVPLDEKLLPQLLKEAGYTTHMVGKWHLGMYRKECLPTRRGFDTYFGYLLGSEDYYSHERCTLIDALNVTRCALDFRDGEEVATGYKNMYSTNIFTKRAIALITNHPPEKPLFLYLALQSVHEPLQVPEEYLKPYDFIQDKNRHHYAGMVSLMDEAVGNVTAALKSSGLWNNTVFIFSTDNGGQTLAGGNNWPLRGRKWSLWEGGVRGVGFVASPLLKQKGVKNRELIHISDWLPTLVKLARGHTNGTKPLDGFDVWKTISEGSPSPRIELLHNIDPNFVDSSPCPRNSMAPAKDDSSLPEYSAFNTSVHAAIRHGNWKLLTGYPGCGYWFPPPSQYNVSEIPSSDPPTKTLWLFDIDRDPEERHDLSREYPHIVTKLLSRLQFYHKHSVPVYFPAQDPRCDPKATGVWGPWM

SEQ ID NO: 205 - protein, 651 aa, Homo sapiens
MARGSAVAWAALGPLLWGCALGLQGGMLYPQESPSRECKELDGLWSFRADFSDNRRRGFEEQWYRRPLWESGPTVDMPVPSSFNDISQDWRLRHFVGWVWYEREVILPERWTQDLRTRVVLRIGSAHSYAIVWVNGVDTLEHEGGYLPFEADISNLVQVGPLPSRLRITIAINNTLTPTTLPPGTIQYLTDTSKYPKGYFVQNTYFDFFNYAGLQRSVLLYTTPTTYIDDITVTTSVEQDSGLVNYQISVKGSNLFKLEVRLLDAENKVVANGTGTQGQLKVPGVSLWWPYLMHERPAYLYSLEVQLTAQTSLGPVSDFYTLPVGIRTVAVTKSQFLINGKPFYFHGVNKHEDADIRGKGFDWPLLVKDFNLLRWLGANAFRTSHYPYAEEVMQMCDRYGIVVIDECPGVGLALPQFFNNVSLHHHMQVMEEVVRRDKNHPAVVMWSVANEPASHLESAGYYLKMVIAHTKSLDPSRPVTFVSNSNYAADKGAPYVDVICLNSYYSWYHDYGHLELIQLQLATQFENWYKKYQKPIIQSEYGAETIAGFHQDPPLMFTEEYQKSLLEQYHLGLDQKRRKYVVGELIWNFADFMTEQSPTRVLGNKKGIFTRQRQPKSAAFLLRERYWKIANETRYPHSVAKSQCLENSLFT

SEQ ID NO: 206 - protein, 1011 aa, Homo sapiens
MGAYARASGVCARGCLDSAGPWTMSRALRPPLPPLCFFLLLLAAAGARAGGYETCPTVQPNMLNVHLLPHTHDDVGWLKTVDQYFYGIKNDIQHAGVQYILDSVISALLADPTRRFIYVEIAFFSRWWHQQTNATQEVVRDLVRQGRLEFANGGWVMNDEAATHYGAIVDQMTLGLRFLEDTFGNDGRPRVAWHIDPFGHSREQASLFAQMGFDGFFFGRLDYQDKWVRMQKLEMEQVWRASTSLKPPTADLFTGVLPNGYNPPRNLCWDVLCVDQPLVEDPRSPEYNAKELVDYFLNVATAQGRYYRTNHTVMTMGSDFQYENANMWFKNLDKLIRLVNAQQAKGSSVHVLYSTPACYLWELNKANLTWSVKHDDFFPYADGPHQFWTGYFSSRPALKRYERLSYNFLQVCNQLEALVGLAANVGPYGSGDSAPLNEAMAVLQHHDAVSGTSRQHVANDYARQLAAGWGPCEVLLSNALARLRGFKDHFTFCQQLNISICPLSQTAARFQVIVYNPLGRKVNWMVRLPVSEGVFVVKDPNGRTVPSDVVIFPSSDSQAHPPELLFSASLPALGFSTYSVAQVPRWKPQARAPQPIPRRSWSPALTIENEHIRATFDPDTGLLMEIMNMNQQLLLPVRQTFFWYNASIGDNESDQASGAYIFRPNQQKPLPVSRWAQIHLVKTPLVQEVHQNFSAWCSQVVRLYPGQRHLELEWSVGPIPVGDTWGKEVISRFDTPLETKGRFYTDSNGREILERRRDYRPTWKLNQTEPVAGNYYPVNTRIYITDGNMQLTVLTDRSQGGSSLRDGSLELMVHRRLLKDDGRGVSEPLMENGSGAWVRGRHLVLLDTAQAAAAGHRLLAEQEVLAPQVVLAPGGGAAYNLGAPPRTQFSGLRRDLPPSVHLLTLASWGPEMVLLRLEHQFAVGEDSGRNLSAPVTLNLRDLFSTFTITRLQETTLVANQLREAASRLKWTTNTGPTPHQTPYQLDPANITLEPMEIRTFLASVQWKEVDG

SEQ ID NO: 207 - protein, 879 aa, Homo sapiens
MRLHLLLLLALCGAGTTAAELSYSLRGNWSICNGNGSLELPGAVPGCVHSALFQQGLIQDSYYRFNDLNYRWVSLDNWTYSKEFKIPFEISKWQKVNLILEGVDTVSKILFNEVTIGETDNMFNRYSFDITNVVRDVNSIELRFQSAVLYAAQQSKAHTRYQVPPDCPPLVQKGECHVNFVRKEQCSFSWDWGPSFPTQGIWKDVRIEAYNICHLNYFTFSPIYDKSAQEWNLEIESTFDVVSSKPVGGQVIVAIPKLQTQQTYSIELQPGKRIVELFVNISKNITVETWWPHGHGNQTGYNMTVLFELDGGLNIEKSAKVYFRTVELIEEPIKGSPGLSFYFKINGFPIFLKGSNWIPADSFQDRVTSELLRLLLQSVVDANMNTLRVWGGGIYEQDEFYELCDELGIMVWQDFMFACALYPTDQGFLDSVTAEVAYQIKRLKSHPSIIIWSGNNENEEALMMNWYHISFTDRPIYIKDYVTLYVKNIRELVLAGDKSRPFITSSPTNGAETVAEAWVSQNPNSNYFGDVHFYDYISDCWNWKVFPKARFASEYGYQSWPSFSTLEKVSSTEDWSFNSKFSLHRQHHEGGNKQMLYQAGLHFKLPQSTDPLRTFKDTIYLTQVMQAQCVKTETEFYRRSRSEIVDQQGHTMGALYWQLNDIWQAPSWASLEYGGKWKMLHYFAQNFFAPLLPVGFENENTFYIYGVSDLHSDYSMTLSVRVHTWSSLEPVCSRVTERFVMKGGEAVCLYEEPVSELLRRCGNCTRESCVVSFYLSADHELLSPTNYHFLSSPKEAVGLCKAQITAIISQQGDIFVFDLETSAVAPFVWLDVGSIPGRFSDNGFLMTEKTRTILFYPWEPTSKNELEQSFHVTSLTDIY

SEQ ID NO: 208 - protein, 466 aa, Homo sapiens
MRAPGMRSRPAGPALLLLLLFLGAAESVRRAQPPRRYTPDWPSLDSRPLPAWFDEAKFGVFIHWGVFSVPAWGSEWFWWHWQGEGRPQYQRFMRDNYPPGFSYADFGPQFTARFFHPEEWADLFQAAGAKYVVLTTKHHEGFTNWPSPVSWNWNSKDVGPHRDLVGELGTALRKRNIRYGLYHSLLEWFHPLYLLDKKNGFKTQHFVSAKTMPELYDLVNSYKPDLIWSDGEWECPDTYWNSTNFLSWLYNDSPVKDEVVVNDRWGQNCSCHHGGYYNCEDKFKPQSLPDHKWEMCTSIDKFSWGYRRDMALSDVTEESEIISELVQTVSLGGNYLLNIGPTKDGLIVPIFQERLLAVGKWLSINGEAIYASKPWRVQWEKNTTSVWYTSKGSAVYAIFLHWPENGVLNLESPITTSTTKITMLGIQGDLKWSTDPDKGLFISLPQLPPSAVPAEFAWTIKLTGVK

SEQ ID NO: 209 - protein, 346 aa, Homo sapiens
MARKSNLPVLLVPFLLCQALVRCSSPLPLVVNTWPFKNATEAAWRALASGGSALDAVESGCAMCEREQCDGSVGFGGSPDELGETTLDAMIMDGTTMDVGAVGDLRRIKNAIGVARKVLEHTTHTLLVGESATTFAQSMGFINEDLSTTASQALHSDWLARNCQPNYWRNVIPDPSKYCGPYKPPGILKQDIPIHKETEDDRGHDTIGMVVIHKTGHIAAGTSTNGIKFKIHGRVGDSPIPGAGAYADDTAGAAAATGNGDILMRFLPSYQAVEYMRRGEDPTIACQKVISRIQKHFPEFFGAVICANVTGSYGAACNKLSTFTQFSFMVYNSEKNQPTEEKVDCI

SEQ ID NO: 210 - protein, 415 aa, Homo sapiens
MTGERPSTALPDRRWGPRILGFWGGCRVWVFAAIFLLLSLAASWSKAENDFGLVQPLVTMEQLLWVSGRQIGSVDTFRIPLITATPRGTLLAFAEARKMSSSDEGAKFIALRRSMDQGSTWSPTAFIVNDGDVPDGLNLGAVVSDVETGVVFLFYSLCAHKAGCQVASTMLVWSKDDGVSWSTPRNLSLDIGTEVFAPGPGSGIQKQREPRKGRLIVCGHGTLERDGVFCLLSDDHGASWRYGSGVSGIPYGQPKQENDFNPDECQPYELPDGSVVINARNQNNYHCHCRIVLRSYDACDTLRPRDVTFDPELVDPVVAAGAVVTSSGIVFFSNPAHPEFRVNLTLRWSFSNGTSWRKETVQLWPGPSGYSSLATLEGSMDGEEQAPQLYVLYEKGRNHYTESISVAKISVYGTL

SEQ ID NO: 211 - protein, 480 aa, Homo sapiens
MIRAAPPPLFLLLLLLLLLVSWASRGEAAPDQDEIQRLPGLAKQPSFRQYSGYLKGSGSKHLHYWFVESQKDPENSPVVLWLNGGPGCSSLDGLLTEHGPFLVQPDGVTLEYNPYSWNLIANVLYLESPAGVGFSYSDDKFYATNDTEVAQSNFEALQDFFRLFPEYKNNKLFLTGESYAGIYIPTLAVLVMQDPSMNLQGLAVGNGLSSYEQNDNSLVYFAYYHGLLGNRLWSSLQTHCCSQNKCNFYDNKDLECVTNLQEVARIVGNSGLNIYNLYAPCAGGVPSHFRYEKDTVVVQDLGNIFTRLPLKRMWHQALLRSGDKVRMDPPCTNTTAASTYLNNPYVRKALNIPEQLPQWDMCNFLVNLQYRRLYRSMNSQYLKLLSSQKYQILLYNGDVDMACNFMGDEWFVDSLNQKMEVQRRPWLVKYGDSGEQIAGFVKEFSHIAFLTIKGAGHMVPTDKPLAAFTMFSRFLNKQPY

SEQ ID NO: 212 - protein, 411 aa, Homo sapiens
MLLKTVLLLGHVAQVLMLDNGLLQTPPMGWLAWERFRCNINCDEDPKNCISEQLFMEMADRMAQDGWRDMGYTYLNIDDCWIGGRDASGRLMPDPKRFPHGIPFLADYVHSLGLKLGIYADMGNFTCMGYPGTTLDKVVQDAQTFAEWKVDMLKLDGCFSTPEERAQGYPKMAAALNATGRPIAFSCSWPAYEGGLPPRVNYSLLADICNLWRNYDDIQDSWWSVLSILNWFVEHQDILQPVAGPGHWNDPDMLLIGNFGLSLEQSRAQMALWTVLAAPLLMSTDLRTISAQNMDILQNPLMIKINQDPLGIQGRRIHKEKSLIEVYMRPLSNKASALVFFSCRTDMPYRYHSSLGQLNFTGSVIYEAQDVYSGDIISGLRDETNFTVIINPSGVVMWYLYPIKNLEMSQQ

SEQ ID NO: 213 - protein, 1256 aa, Homo sapiens
MLFKLLQRQTYTCLSHRYGLYVCFLGVVVTIVSAFQFGEVVLEWSRDQYHVLFDSYRDNIAGKSFQNRLCLPMPIDVVYTWVNGTDLELLKELQQVREQMEEEQKAMREILGKNTTEPTKKSEKQLECLLTHCIKVPMLVLDPALPANITLKDLPSLYPSFHSASDIFNVAKPKNPSTNVSVVVFDSTKDVEDAHSGLLKGNSRQTVWRGYLTTDKEVPGLVLMQDLAFLSGFPPTFKETNQLKTKLPENLSSKVKLLQLYSEASVALLKLNNPKDFQELNKQTKKNMTIDGKELTISPAYLLWDLSAISQSKQDEDISASRFEDNEELRYSLRSIERHAPWVRNIFIVTNGQIPSWLNLDNPRVTIVTHQDVFRNLSHLPTFSSPAIESHIHRIEGLSQKFIYLNDDVMFGKDVWPDDFYSHSKGQKVYLTWPVPNCAEGCPGSWIKDGYCDKACNNSACDWDGGDCSGNSGGSRYIAGGGGTGSIGVGQPWQFGGGINSVSYCNQGCANSWLADKFCDQACNVLSCGFDAGDCGQDHFHELYKVILLPNQTHYIIPKGECLPYFSFAEVAKRGVEGAYSDNPIIRHASIANKWKTIHLIMHSGMNATTIHFNLTFQNTNDEEFKMQITVEVDTREGPKLNSTAQKGYENLVSPITLLPEAEILFEDIPKEKRFPKFKRHDVNSTRRAQEEVKIPLVNISLLPKDAQLSLNTLDLQLEHGDITLKGYNLSKSALLRSFLMNSQHAKIKNQAIITDETNDSLVAPQEKQVHKSILPNSLGVSERLQRLTFPAVSVKVNGHDQGQNPPLDLETTARFRVETHTQKTIGGNVTKEKPPSLIVPLESQMTKEKKITGKEKENSRMEENAENHIGVTEVLLGRKLQHYTDSYLGFLPWEKKKYFQDLLDEEESLKTQLAYFTDSKNTGRQLKDTFADSLRYVNKILNSKFGFTSRKVPAHMPHMIDRIVMQELQDMFPEEFDKTSFHKVRHSEDMQFAFSYFYYLMSAVQPLNISQVFDEVDTDQSGVLSDREIRTLATRIHELPLSLQDLTGLEHMLINCSKMLPADITQLNNIPPTQESYYDPNLPPVTKSLVTNCKPVTDKIHKAYKDKNKYRFEIMGEEEIAFKMIRTNVSHVVGQLDDIRKNPRKFVCLNDNIDHNHKDAQTVKAVLRDFYESMFPIPSQFELPREYRNRFLHMHELQEWRAYRDKLKFWTHCVLATLIMFTIFSFFAEQLIALKRKIFPRRRIHKEASPNRIRV

SEQ ID NO: 214 - protein, 367 aa, Homo sapiens
MIRNWLTIFILFPLKLVEKCESSVSLTVPPVVKLENGSSTNVSLTLRPPLNATLVITFEITFRSKNITILELPDEVVVPPGVTNSSFQVTSQNVGQLTVYLHGNHSNQTGPRIRFLVIRSSAISIINQVIGWIYFVAWSISFYPQVIMNWRRKSVIGLSFDFVALNLTGFVAYSVFNIGLLWVPYIKEQFLLKYPNGVNPVNSNDVFFSLHAVVLTLIIIVQCCLYERGGQRVSWPAIGFLVLAWLFAFVTMIVAAVGVTTWLQFLFCFSYIKLAVTLVKYFPQAYMNFYYKSTEGWSIGNVLLDFTGGSFSLLQMFLQSYNNDQWTLIFGDPTKFGLGVFSIVFDVVFFIQHFCLYRKRPGYDQLN

SEQ ID NO: 215 - protein, 495 aa, Homo sapiens
MRSPVRDLARNDGEESTDRTPLLPGAPRAEAAPVCCSARYNLAILAFFGFFIVYALRVNLSVALVDMVDSNTTLEDNRTSKACPEHSAPIKVHHNQTGKKYQWDAETQGWILGSFFYGYIITQIPGGYVASKIGGKMLLGFGILGTAVLTLFTPIAADLGVGPLIVLRALEGLGEGVTFPAMHAMWSSWAPPLERSKLLSISYAGAQLGTVISLPLSGIICYYMNWTYVFYFFGTIGIFWFLLWIWLVSDTPQKHKRISHYEKEYILSSLRNQLSSQKSVPWVPILKSLPLWAIVVAHFSYNWTFYTLLTLLPTYMKEILRFNVQENGFLSSLPYLGSWLCMILSGQAADNLRAKWNFSTLCVRRIFSLIGMIGPAVFLVAAGFIGCDYSLAVAFLTISTTLGGFCSSGFSINHLDIAPSYAGILLGITNTFATIPGMVGPVIAKSLTPDNTVGEWQTVFYIAAAINVFGAIFFTLFAKGEVQNWALNDHHGHRH

SEQ ID NO: 216 - protein, 438 aa, Homo sapiens
MGGCAGSRRRFSDSEGEETVPEPRLPLLDHQGAHWKNAVGFWLLGLCNNFSYVVMLSAAHDILSHKRTSGNQSHVDPGPTPIPHNSSSRFDCNSVSTAAVLLADILPTLVIKLLAPLGLHLLPYSPRVLVSGICAAGSFVLVAFSHSVGTSLCGVVFASISSGLGEVTFLSLTAFYPRAVISWWSSGTGGAGLLGALSYLGLTQAGLSPQQTLLSMLGIPALLLASYFLLLTSPEAQDPGGEEEAESAARQPLIRTEAPESKPGSSSSLSLRERWTVFKGLLWYIVPLVVVYFAEYFINQGLFELLFFWNTSLSHAQQYRWYQMLYQAGVFASRSSLRCCRIRFTWALALLQCLNLVFLLADVWFGFLPSIYLVFLIILYEGLLGGAAYVNTFHNIALETSDEHREFAMAATCISDTLGISLSGLLALPLHDFLCQLS

SEQ ID NO: 217 - protein, 306 aa, Homo sapiens
MASPGCLWLLAVALLPWTCASRALQHLDPPAPLPLVIWHGMGDSCCNPLSMGAIKKMVEKKIPGIYVLSLEIGKTLMEDVENSFFLNVNSQVTTVCQALAKDPKLQQGYNAMGFSQGGQFLRAVAQRCPSPPMINLISVGGQHQGVFGLPRCPGESSHICDFIRKTLNAGAYSKVVQERLVQAEYWHDPIKEDVYRNHSIFLADINQERGINESYKKNLMALKKFVMVKFLNDSIVDPVDSEWFGFYRSGQAKETIPLQETSLYTQDRLGLKEMDNAGQLVFLATEGDHLQLSEEWFYAHIIPFLG

SEQ ID NO: 218 - protein, 580 aa, Homo sapiens
MTAPAGPRGSETERLLTPNPGYGTQAGPSPAPPTPPEEEDLRRRLKYFFMSPCDKFRAKGRKPCKLMLQVVKILVVTVQLILFGLSNQLAVTFREENTIAFRHLFLLGYSDGADDTFAAYTREQLYQAIFHAVDQYLALPDVSLGRYAYVRGGGDPWTNGSGLALCQRYYHRGHVDPANDTFDIDPMVVTDCIQVDPPERPPPPPSDDLTLLESSSSYKNLTLKFHKLVNVTIHFRLKTINLQSLINNEIPDCYTFSVLITFDNKAHSGRIPISLETQAHIQECKHPSVFQHGDNSFRLLFDVVVILTCSLSFLLCARSLLRGFLLQNEFVGFMWRQRGRVISLWERLEFVNGWYILLVTSDVLTISGTIMKIGIEAKNLASYDVCSILLGTSTLLVWVGVIRYLTFFHNYNILIATLRVALPSVMRFCCCVAVIYLGYCFCGWIVLGPYHVKFRSLSMVSECLFSLINGDDMFVTFAAMQAQQGRSSLVWLFSQLYLYSFISLFIYMVLSLFIALITGAYDTIKHPGGAGAEESELQAYIAQCQDSPTSGKFRRGSGSACSLLCCCGRDPSEEHSLLVN

SEQ ID NO: 219 - protein, 524 aa, Homo sapiens
MYALFLLASLLGAALAGPVLGLKECTRGSAVWCQNVKTASDCGAVKHCLQTVWNKPTVKSLPCDICKDVVTAAGDMLKDNATEEEILVYLEKTCDWLPKPNMSASCKEIVDSYLPVILDIIKGEMSRPGEVCSALNLCESLQKHLAELNHQKQLESNKIPELDMTEVVAPFMANIPLLLYPQDGPRSKPQPKDNGDVCQDCIQMVTDIQTAVRTNSTFVQALVEHVKEECDRLGPGMADICKNYISQYSEIAIQMMMHMQPKEICALVGFCDEVKEMPMQTLVPAKVASKNVIPALELVEPIKKHEVPAKSDVYCEVCEFLVKEVTKLIDNNKTEKEILDAFDKMCSKLPKSLSEECQEVVDTYGSSILSILLEEVSPELVCSMLHLCSGTRLPALTVHVTQPKDGGFCEVCKKLVGYLDRNLEKNSTKQEILAALEKGCSFLPDPYQKQCDQFVAEYEPVLIEILVEVMDPSFVCLKIGACPSAHKPLLGTEKCIWGPSYWCQNTETAAQCNAVEHCKRHVWN

SEQ ID NO: 220 - protein, 726 aa, Homo sapiens
MRPLLLLALLGWLLLAEAKGDAKPEDNLLVLTVATKETEGFRRFKRSAQFFNYKIQALGLGEDWNVEKGTSAGGGQKVRLLKKALEKHADKEDLVILFADSYDVLFASGPRELLKKFRQARSQVVFSAEELIYPDRRLETKYPVVSDGKRFLGSGGFIGYAPNLSKLVAEWEGQDSDSDQLFYTKIFLDPEKREQINITLDHRCRIFQNLDGALDEVVLKFEMGHVRARNLAYDTLPVLIHGNGPTKLQLNYLGNYIPRFWTFETGCTVCDEGLRSLKGIGDEALPTVLVGVFIEQPTPFVSLFFQRLLRLHYPQKHMRLFIHNHEQHHKAQVEEFLAQHGSEYQSVKLVGPEVRMANADARNMGADLCRQDRSCTYYFSVDADVALTEPNSLRLLIQQNKNVIAPLMTRHGRLWSNFWGALSADGYYARSEDYVDIVQGRRVGVWNVPYISNIYLIKGSALRGELQSSDLFHHSKLDPDMAFCANIRQQDVFMFLTNRHTLGHLLSLDSYRTTHLHNDLWEVFSNPEDWKEKYIHQNYTKALAGKLVETPCPDVYWFPIFTEVACELVEEMEHFGQWSLGNNKDNRIQGGYENVPTIDIHMNQIGFEREWHKFLLEYIAPMTEKLYPGYYTRAQFDLAFVVRYKPDEQPSLMPHHDASTFTINIALNRVGVDYEGGGCRFLRYNCSIRAPRKGWTLMHPGRLTHYHEGLPTTRGTRYIAVSFVDP

SEQ ID NO: 221 - protein, 357 aa, Homo sapiens
MEEGMNVLHDFGIQSTHYLQVNYQDSQDWFILVSVIADLRNAFYVLFPIWFHLQEAVGIKLLWVAVIGDWLNLVFKWILFGQRPYWWVLDTDYYSNTSVPLIKQFPVTCETGPGSPSGHAMGTAGVYYVMVTSTLSIFQGKIKPTYRFRCLNVILWLGFWAVQLNVCLSRIYLAAHFPHQVVAGVLSGIAVAETFSHIHSIYNASLKKYFLITFFLFSFAIGFYLLLKGLGVDLLWTLEKAQRWCEQPEWVHIDTTPFASLLKNLGTLFGLGLALNSSMYRESCKGKLSKWLPFRLSSIVASLVLLHVFDSLKPPSQVELVFYVLSFCKSAVVPLASVSVIPYCLAQVLGQPHKKSL

SEQ ID NO: 222 - protein, 429 aa, Homo sapiens
MAAQGYGYYRTVIFSAMFGGYSLYYFNRKTFSFVMPSLVEEIPLDKDDLGFITSSQSAAYAISKFVSGVLSDQMSARWLFSSGLLLVGLVNIFFAWSSTVPVFAALWFLNGLAQGLGWPPCGKVLRKWFEPSQFGTWWAILSTSMNLAGGLGPILATILAQSYSWRSTLALSGALCVVVSFLCLLLIHNEPADVGLRNLDPMPSEGKKGSLKEESTLQELLLSPYLWVLSTGYLVVFGVKTCCTDWGQFFLIQEKGQSALVGSSYMSALEVGGLVGSIAAGYLSDRAMAKAGLSNYGNPRHGLLLFMMAGMTVSMYLFRVTVTSDSPKLWILVLGAVFGFSSYGPIALFGVIANESAPPNLCGTSHAIVGLMANVGGFLAGLPFSTIAKHYSWSTAFWVAEVICAASTAAFFLLRNIRTKMGRVSKKAE

SEQ ID NO: 223 - protein, 507 aa, Homo sapiens
MEKWYLMTVVVLIGLTVRWTVSLNSYSGAGKPPMFGDYEAQRHWQEITFNLPVKQWYFNSSDNNLQYWGLDYPPLTAYHSLLCAYVAKFINPDWIALHTSRGYESQAHKLFMRTTVLIADLLIYIPAVVLYCCCLKEISTKKKIANALCILLYPGLILIDYGHFQYNSVSLGFALWGVLGISCDCDLLGSLAFCLAINYKQMELYHALPFFCFLLGKCFKKGLKGKGFVLLVKLACIVVASFVLCWLPFFTEREQTLQVLRRLFPVDRGLFEDKVANIWCSFNVFLKIKDILPRHIQLIMSFCSTFLSLLPACIKLILQPSSKGFKFTLVSCALSFFLFSFQVHEKSILLVSLPVCLVLSEIPFMSTWFLLVSTFSMLPLLLKDELLMPSVVTTMAFFIACVTSFSIFEKTSEEELQLKSFSISVRKYLPCFTFLSRIIQYLFLISVITMVLLTLMTVTLDPPQKLPDLFSVLVCFVSCLNFLFFLVYFNIIIMWDSKSGRNQKKIS

SEQ ID NO: 224 - protein, 438 aa, Homo sapiens
MAAGLRKRGRSGSAAQAEGLCKQWLQRAWQERRLLLREPRYTLLVAACLCLAEVGITFWVIHRVAYTEIDWKAYMAEVEGVINGTYDYTQLQGDTGPLVYPAGFVYIFMGLYYATSRGTDIRMAQNIFAVLYLATLLLVFLIYHQTCKVPPFVFFFMCCASYRVHSIFVLRLFNDPVAMVLLFLSINLLLAQRWGWGCCFFSLAVSVKMNVLLFAPGLLFLLLTQFGFRGALPKLGICAGLQVVLGLPFLLENPSGYLSRSFDLGRQFLFHWTVNWRFLPEALFLHRAFHLALLTAHLTLLLLFALCRWHRTGESILSLLRDPSKRKVPPQPLTPNQIVSTLFTSNFIGICFSRSLHYQFYVWYFHTLPYLLWAMPARWLTHLLRLLVLGLIELSWNTYPSTSCSSAALHICHAVILLQLWLGPQPFPKSTQHSKKAH

SEQ ID NO: 225 - protein, 447 aa, Homo sapiens
MRFRIYKRKVLILTLVVAACGFVLWSSNGRQRKNEALAPPLLDAEPARGAGGRGGDHPSVAVGIRRVSNVSAASLVPAVPQPEADNLTLRYRSLVYQLNFDQTLRNVDKAGTWAPRELVLVVQVHNRPEYLRLLLDSLRKAQGIDNVLVIFSHDFWSTEINQLIAGVNFCPVLQVFFPFSIQLYPNEFPGSDPRDCPRDLPKNAALKLGCINAEYPDSFGHYREAKFSQTKHHWWWKLHFVWERVKILRDYAGLILFLEEDHYLAPDFYHVFKKMWKLKQQECPECDVLSLGTYSASRSFYGMADKVDVKTWKSTEHNMGLALTRNAYQKLIECTDTFCTYDDYNWDWTLQYLTVSCLPKFWKVLVPQIPRIFHAGDCGMHHKKTCRPSTQSAQIESLLNNNKQYMFPETLTISEKFTVVAISPPRKNGGWGDIRDHELCKSYRRLQ

SEQ ID NO: 226 - protein, 837 aa, Homo sapiens
MARGERRRRAVPAEGVRTAERAARGGPGRRDGRGGGPRSTAGGVALAVVVLSLALGMSGRWVLAWYRARRAVTLHSAPPVLPADSSSPAVAPDLFWGTYRPHVYFGMKTRSPKPLLTGLMWAQQGTTPGTPKLRHTCEQGDGVGPYGWEFHDGLSFGRQHIQDGALRLTTEFVKRPGGQHGGDWSWRVTVEPQDSGTSALPLVSLFFYVVTDGKEVLLPEVGAKGQLKFISGHTSELGDFRFTLLPPTSPGDTAPKYGSYNVFWTSNPGLPLLTEMVKSRLNSWFQHRPPGAPPERYLGLPGSLKWEDRGPSGQGQGQFLIQQVTLKIPISIEFVFESGSAQAGGNQALPRLAGSLLTQALESHAEGFRERFEKTFQLKEKGLSSGEQVLGQAALSGLLGGIGYFYGQGLVLPDIGVEGSEQKVDPALFPPVPLFTAVPSRSFFPRGFLWDEGFHQLVVQRWDPSLTREALGHWLGLLNADGWIGREQILGDEARARVPPEFLVQRAVHANPPTLLLPVAHMLEVGDPDDLAFLRKALPRLHAWFSWLHQSQAGPLPLSYRWRGRDPALPTLLNPKTLPSGLDDYPRASHPSVTERHLDLRCWVALGARVLTRLAEHLGEAEVAAELGPLAASLEAAESLDELHWAPELGVFADFGNHTKAVQLKPRPPQGLVRVVGRPQPQLQYVDALGYVSLFPLLLRLLDPTSSRLGPLLDILADSRHLWSPFGLRSLAASSSFYGQRNSEHDPPYWRGAVWLNVNYLALGALHHYGHLEGPHQARAAKLHGELRANVVGNVWRQYQATGFLWEQYSDRDGRGMGCRPFHGWTSLVLLAMAEDY

SEQ ID NO: 227 - DNA, 2523 bp, Homo sapiens
agtcaagtgacgcgaagcggccggcctgggcgccgactgcagagccgggaggctggtggtcatgccggggttcctggttcgcatcctccctctgttgctggttctgctgcttctgggccctacgcgcggcttgcgcaatgccacccagaggatgtttgaaattgactatagccgggactccttcctcaaggatggccagccatttcgctacatctcaggaagcattcactactcccgtgtgccccgcttctactggaaggaccggctgctgaagatgaagatggctgggctgaacgccatccagacgtatgtgccctggaactttcatgagccctggccaggacagtaccagttttctgaggaccatgatgtggaatattttcttcggctggctcatgagctgggactgctggttatcctgaggcccgggccctacatctgtgcagagtgggaaatgggaggattacctgcttggctgctagagaaagagtctattcttctccgctcctccgacccagattacctggcagctgtggacaagtggttgggagtccttctgcccaagatgaagcctctcctctatcagaatggagggccagttataacagtgcaggttgaaaatgaatatggcagctactttgcctgtgattttgactacctgcgcttcctgcagaagcgctttcgccaccatctgggggatgatgtggttctgtttaccactgatggagcacataaaacattcctgaaatgtggggccctgcagggcctctacaccacggtggactttggaacaggcagcaacatcacagatgctttcctaagccagaggaagtgtgagcccaaaggacccttgatcaattctgaattctatactggctggctagatcactggggccaacctcactccacaatcaagaccgaagcagtggcttcctccctctatgatatacttgcccgtggggcgagtgtgaacttgtacatgtttataggtgggaccaattttgcctattggaatggggccaactcaccctatgcagcacagcccaccagctacgactatgatgccccactgagtgaggctggggacctcactgagaagtattttgctctgcgaaacatcatccagaagtttgaaaaagtaccagaaggtcctatccctccatctacaccaaagtttgcatatggaaaggtcactttggaaaagttaaagacagtgggagcagctctggacattctgtgtccctctgggcccatcaaaagcctttatcccttgacatttatccaggtgaaacagcattatgggtttgtgctgtaccggacaacacttcctcaagattgcagcaacccagcacctctctcttcacccctcaatggagtccacgatcgagcatatgttgctgtggatgggatcccccagggagtccttgagcgaaacaatgtgatcactctgaacataacagggaaagctggagccactctggaccttctggtagagaacatgggacgtgtgaactatggtgcatatatcaacgattttaagggtttggtttctaacctgactctcagttccaatatcctcacggactggacgatctttccactggacactgaggatgcagtgtgcagccacctggggggctggggacaccgtgacagtggccaccatgatgaagcctgggcccacaactcatccaactacacgctcccggccttttatatggggaacttctccattcccagtgggatcccagacttgccccaggacacctttatccagtttcctggatggaccaagggccaggtctggattaatggctttaaccttggccgctattggccagcccggggccctcagttgaccttgtttgtgccccagcacatcctgatgacctcggccccaaacaccatcaccgtgctggaactggagtgggcaccctgcagcagtgatgatccagaactatgtgctgtgacgttcgtggacaggccagttattggctcatctgtgacctacgatcatccctccaaacctgttgaaaaaagactcatgcccccacccccgcaaaaaaacaaagattcatggctggaccatgtatgatgatgaaagcctgtgtctttgagggattctaccctgaacatacctcacagatcctccctgtcatgccacatttcactgattggaatgtggaaatggaaaaggaatttaggatgtgcattttcacctgaggtttccctgcatccctgcagtgccaaagccccaccttcagggaccacctggaatgtgtgaggggctgacagcacagtaacgtgcatacatatctgcagggctggaatggaagctttaaaggtggtagtgatttttattttggaagaatcatgttacctttttgttaaataaaatttgtactcaaatgatgatgtcactgtttttaatgtgcaggtattgaattatatggtctgacttaaatcataactagacttgagtgggctgaataaaccacttcactaacttgaagttcaaaagga

SEQ ID NO: 228 - DNA, 4785 bp, Homo sapiens
ctcacgtggccagccccctccgagaggggagaccagcgggccatgacaagctccaggctttggttttcgctgctgctggcggcagcgttcgcaggacgggcgacggccctctggccctggcctcagaacttccaaacctccgaccagcgctacgtcctttacccgaacaactttcaattccagtacgatgtcagctcggccgcgcagcccggctgctcagtcctcgacgaggccttccagcgctatcgtgacctgcttttcggttccgggtcttggccccgtccttacctcacagggaaacggcatacactggagaagaatgtgttggttgtctctgtagtcacacctggatgtaaccagcttcctactttggagtcagtggagaattataccctgaccataaatgatgaccagtgtttactcctctctgagactgtctggggagctctccgaggtctggagacttttagccagcttgtttggaaatctgctgagggcacattctttatcaacaagactgagattgaggactttccccgctttcctcaccggggcttgctgttggatacatctcgccattacctgccactctctagcatcctggacactctggatgtcatggcgtacaataaattgaacgtgttccactggcatctggtagatgatccttccttcccatatgagagcttcacttttccagagctcatgagaaaggggtcctacaaccctgtcacccacatctacacagcacaggatgtgaaggaggtcattgaatacgcacggctccggggtatccgtgtgcttgcagagtttgacactcctggccacactttgtcctggggaccaggtatccctggattactgactccttgctactctgggtctgagccctctggcacctttggaccagtgaatcccagtctcaataatacctatgagttcatgagcacattcttcttagaagtcagctctgtcttcccagatttttatcttcatcttggaggagatgaggttgatttcacctgctggaagtccaacccagagatccaggactttatgaggaagaaaggcttcggtgaggacttcaagcagctggagtccttctacatccagacgctgctggacatcgtctcttcttatggcaagggctatgtggtgtggcaggaggtgtttgataataaagtaaagattcagccagacacaatcatacaggtgtggcgagaggatattccagtgaactatatgaaggagctggaactggtcaccaaggccggcttccgggcccttctctctgccccctggtacctgaaccgtatatcctatggccctgactggaaggatttctacatagtggaacccctggcatttgaaggtacccctgagcagaaggctctggtgattggtggagaggcttgtatgtggggagaatatgtggacaacacaaacctggtccccaggctctggcccagagcaggggctgttgccgaaaggctgtggagcaacaagttgacatctgacctgacatttgcctatgaacgtttgtcacacttccgctgtgaattgctgaggcgaggtgtccaggcccaacccctcaatgtaggcttctgtgagcaggagtttgaacagacctgagccccaggcaccgaggagggtgctggctgtaggtgaatggtagtggagccaggcttccactgcatcctggccaggggacggagccccttgccttcgtgccccttgcctgcgtgcccctgtgcttggagagaaaggggccggtgctggcgctcgcattcaataaagagtaatgtggcatttttctataataaacatggattacctgtgtttaaaaaaaaaagtgtgaatggcgttagggtaagggcacagccaggctggagtcagtgtctgcccctgaggtcttttaagttgagggctgggaatgaaacctatagcctttgtgctgttctgccttgcctgtgagctatgtcactcccctcccactcctgaccatattccagacacctgccctaatcctcagcctgctcacttcacttctgcattatatctccaaggcgttggtatatggaaaaagatgtaggggcttggaggtgttctggacagtggggagggctccagacccaacctggtcacagaagagcctctcccccatgcatactcatccacctccctcccctagagctattctcctttgggtttcttgctgcttcaattttatacaaccattatttaaatattattaaacacatattgttctctaggcactgtggtagtgggtttttttgttgtttttgtttttgagactgtctcaaaaactctgtcgcccaggctgacagtgcagtggcacaatcttggctcactgcagcctctgcctcctgggttcaagcgattctcgtgcatcagcctcctgagtaactggaattaataggcacgtgccaccatgtccatctaattcatatatatatattttttttttctgagacggagtctcactgtcacacaggctggagtgcagtggcacgatctcgactcactgcaagctccacctcctgggttcacgccattctcctgcctcagcctccccagtagctgggactacaggcgcccgccaccacgcccggctaattttttgtatttttagtagagatggggtttctccgtgttagccaggatggtctcgatctcctgacctcgtgatccgcccgccttggcctcccaaagtgctgggattacaggcgtgagccaccgcgcccggccgaattcatctatttttagtagagatggggtttcactatattggccaggctggtcttgaactcatgacctcagatgttcacttgtcttggcctcccaaagtgctgggattagaggcgtgagccaccgcacgcgggcctgtggtaaattgttgaatttgaaggactcagaggccctggtcaattccaaaataacgtaggcgacttccatccccctcctcccaaccattttcagcccaaagcatcttcgcagggaatggatggctgcgcggaggtgggcggtggctctggagagggtctttgcaggtgtgattttctctagaaggaaatgtctcgtcgtggacccagactgccccctcctggtttcagatgcagaagtgatactgtaagccagaggcgggggcagtaatgcatcgcagccattttaggtgaggatttccttggcggttatttgttaagttctttggctgggccctgggctggggtaacaatggacaggttccaggcatttttttcagaaagcttccagtgtagtggatacagaaacttcaggaaggcagggctgagaaggatctgagtaaaactcggtccttcaacaccatccttcagcccctgggtcatgttccttcgaggtcctggtgggaggtagacaagcctagccttgtgctgttcctgtaaggacagggtgggcattttctaccaacagaattcttggaattttcacacagcccagcctagccaagtccagggctatagcccagatacacaagttaaggtcccagcactggcacccaccacaggagcccccttacctctattacccagaagcttgtaggaggggtggtccgcagacaaggaccctgcacaggtgcgaccctgcttccctcctggtcataactttcatgttactattgcttgggataatgttaagtaaaaatagcagacactgagttttaagtctcaagtggatgaaggcagagatcgtgatacacttgagttaaagcagtagggttctgtcattttctattcctgttgtaaacattttctttaatgttattatttttaccactaaactaacgtggcctggtcacgactttcattggtaaagtgtgctgttcctcaccctccaccgttgctcctttggtccactgatcataagagcatttacctgaaggtcgtcagacctcgaatgccaacaggtcaactgcagtggcctgcagttaccacccagtctgttccaatgaacagaatcgctgttgccccaactcatctcccttcacctaggctgtaaattgaaagtcccacccctgagcggaacacaggccatcttgtgtgctgtgcaccaccagggggtggggaagtttccagactgacttcctggctccagtcatcctaggaaaagagttctccagtcgctccccacccccaccccttcccattccaggagtctattaaggaggcaaagcaggcctaacgggtatcaaagcaaaggagtgaatggagactgggagagtcttcaacctctcctctccttggtaggagctgaggctgcatgccaggtaccttcccttcgaggaatctaataaagctaggtcactggtgttttcaggtgcttctcaaaggattgccgtaggggtaggatatcaggatgtgggagcacaggtgccaccacagcactagtgatggagagtcattgcccctagacttctgggacagtgagactgtgaggaaagctgaaatgatactgggaaagggtgaaagaaaggatgtaggtggaatttatttagtattaatgtaggtacacataccttatggcaacattcctagcactctaaattctagatttgtatagtttctgtcaatatcttttgtaagcttaatcaatacagggcatgacaagtatgtgtcacatacttttttttccacgaagaaaaaaaataagtaggaattgggtgctttgtttatcaaaatttgtatttcctttataaataaactttgaaataaaggttgaaaattagta

SEQ ID NO: 229 - DNA, 4785 bp, Homo sapiens; identical to SEQ ID NO: 228

SEQ ID NO: 230 - DNA, 1812 bp, Homo sapiens
agaccgggcggaaagcagccgagcggccatggagctgtgcgggctggggctgccccggccgcccatgctgctggcgctgctgttggcgacactgctggcggcgatgttggcgctgctgactcaggtggcgctggtggtgcaggtggcggaggcggctcgggccccgagcgtctcggccaagccggggccggcgctgtggcccctgccgctcttggtgaagatgaccccgaacctgctgcatctcgccccggagaacttctacatcagccacagccccaattccacggcgggcccctcctgcaccctgctggaggaagcgtttcgacgatatcatggctatatttttggtttctacaagtggcatcatgaacctgctgaattccaggctaaaacccaggttcagcaacttcttgtctcaatcacccttcagtcagagtgtgatgctttccccaacatatcttcagatgagtcttatactttacttgtgaaagaaccagtggctgtccttaaggccaacagagtttggggagcattacgaggtttagagacctttagccagttagtttatcaagattcttatggaactttcaccatcaatgaatccaccattattgattctccaaggttttctcacagaggaattttgattgatacatccagacattatctgccagttaagattattcttaaaactctggatgccatggcttttaataagtttaatgttcttcactggcacatagttgatgaccagtctttcccatatcagagcatcacttttcctgagttaagcaataaaggaagctattctttgtctcatgtttatacaccaaatgatgtccgtatggtgattgaatatgccagattacgaggaattcgagtcctgccagaatttgatacccctgggcatacactatcttggggaaaaggtcagaaagacctcctgactccatgttacagtagacaaaacaagttggactcttttggacctataaaccctactctgaatacaacatacagcttccttactacatttttcaaagaaattagtgaggtgtttccagatcaattcattcatttgggaggagatgaagtggaatttaaatgttgggaatcaaatccaaaaattcaagatttcatgaggcaaaaaggctttggcacagattttaagaaactagaatctttctacattcaaaaggttttggatattattgcaaccataaacaagggatccattgtctggcaggaggtttttgatgataaagcaaagcttgcgccgggcacaatagttgaagtatggaaagacagcgcatatcctgaggaactcagtagagtcacagcatctggcttccctgtaatcctttctgctccttggtacttagatttgattagctatggacaagattggaggaaatactataaagtggaacctcttgattttggcggtactcagaaacagaaacaacttttcattggtggagaagcttgtctatggggagaatatgtggatgcaactaacctcactccaagattatggcctcgggcaagtgctgttggtgagagactctggagttccaaagatgtcagagatatggatgacgcctatgacagactgacaaggcaccgctgcaggatggtcgaacgtggaatagctgcacaacctctttatgctggatattgtaaccatgagaacatgtaaaaaatggaggggaaaaaggccacagcaatctgtactacaatcaactttattttgaaatcatgtaaaataagatattagactgttttttgaataaaatatttttattgattgaa

SEQ ID NO: 231 - DNA, 1318 bp, Homo sapiens
atgctgtccggtcaccgtgacaatgcagctgaggaacccagaactacatctgggctgcgcgcttgcgcttcgcttcctggccctcgtttcctgggacatccctggggctagagcactggacaatggattggcaaggacgcctaccatgggctggctgcactgggagcgcttcatgtgcaaccttgactgccaggaagagccagattcctgcatcagtgagaagctcttcatggagatggcagagctcatggtctcagaaggctggaaggatgcaggttatgagtacctctgcattgatgactgttggatggctccccaaagagattcagaaggcagacttcaggcagaccctcagcgctttcctcatgggattcgccagctagctaattatgttcacagcaaaggactgaagctagggatttatgcagatgttggaaataaaacctgcgcaggcttccctgggagttttggatactacgacattgatgcccagacctttgctgactggggagtagatctgctaaaatttgatggttgttactgtgacagtttggaaaatttggcagatggttataagcacatgtccttggccctgaataggactggcagaagcattgtgtactcctgtgagtggcctctttatatgtggccctttcaaaagcccaattatacagaaatccgacagtactgcaatcactggcgaaattttgctgacattgatgattcctggaaaagtataaagagtatcttggactggacatcttttaaccaggagagaattgttgatgttgctggaccagggggttggaatgacccagatatgttagtgattggcaactttggcctcagctggaatcagcaagtaactcagatggccctctgggctatcatggctgctcctttattcatgtctaatgacctccgacacatcagccctcaagccaaagctctccttcaggataaggacgtaattgccatcaatcaggaccccttgggcaagcaagggtaccagcttagacagggagacaactttgaagtgtgggaacgacctctctcaggcttagcctgggctgtagctatgataaaccggcaggagattggtggacctcgctcttataccatcgcagttgcttccctgggtaaaggagtggcctgtaatcctgcctgcttcatcacacagctcctccctgtgaaaaggaagctagggttctatgaatggacttcaaggttaagaagtcacataaatcccacaggcactgttttgcttcagctagaaaatacaatgcagatgtcattaaaagacttactttaaaatgtt

SEQ ID NO: 232 - DNA, 2291 bp, Homo sapiens
ggaattacttgcagggctaacctagtgcctatagctaaggcaggtacctgcatccttgtttttgtttagtggatcctctatccttcagagactctggaacccctgtggtcttctcttcatctaatgaccctgaggggatggagttttcaagtccttccagagaggaatgtcccaagcctttgagtagggtaagcatcatggctggcagcctcacaggattgcttctacttcaggcagtgtcgtgggcatcaggtgcccgcccctgcatccctaaaagcttcggctacagctcggtggtgtgtgtctgcaatgccacatactgtgactcctttgaccccccgacctttcctgcccttggtaccttcagccgctatgagagtacacgcagtgggcgacggatggagctgagtatggggcccatccaggctaatcacacgggcacaggcctgctactgaccctgcagccagaacagaagttccagaaagtgaagggatttggaggggccatgacagatgctgctgctctcaacatccttgccctgtcaccccctgcccaaaatttgctacttaaatcgtacttctctgaagaaggaatcggatataacatcatccgggtacccatggccagctgtgacttctccatccgcacctacacctatgcagacacccctgatgatttccagttgcacaacttcagcctcccagaggaagataccaagctcaagatacccctgattcaccgagccctgcagttggcccagcgtcccgtttcactccttgccagcccctggacatcacccacttggctcaagaccaatggagcggtgaatgggaaggggtcactcaagggacagcccggagacatctaccaccagacctgggccagatactttgtgaagttcctggatgcctatgctgagcacaagttacagttctgggcagtgacagctgaaaatgagccttctgctgggctgttgagtggataccccttccagtgcctgggcttcacccctgaacatcagcgagacttcattgcccgtgacctaggtcctaccctcgccaacagtactcaccacaatgtccgcctactcatgctggatgaccaacgcttgctgctgccccactgggcaaaggtggtactgacagacccagaagcagctaaatatgttcatggcattgctgtacattggtacctggactttctggctccagccaaagccaccctaggggagacacaccgcctgttccccaacaccatgctctttgcctcagaggcctgtgtgggctccaagttctgggagcagagtgtgcggctaggctcctgggatcgagggatgcagtacagccacagcatcatcacgaacctcctgtaccatgtggtcggctggaccgactggaaccttgccctgaaccccgaaggaggacccaattgggtgcgtaactttgtcgacagtcccatcattgtagacatcaccaaggacacgttttacaaacagcccatgttctaccaccttggccacttcagcaagttcattcctgagggctcccagagagtggggctggttgccagtcagaagaacgacctggacgcagtggcactgatgcatcccgatggctctgctgttgtggtcgtgctaaaccgctcctctaaggatgtgcctcttaccatcaaggatcctgctgtgggcttcctggagacaatctcacctggctactccattcacacctacctgtggcgtcgccagtgatggagcagatactcaaggaggcactgggctcagcctgggcattaaagggacagagtcagctcacacgctgtctgtgactaaagagggcacagcagggccagtgtgagcttacagcgacgtaagcccaggggcaatggtttgggtgactcactttcccctctaggtggtgccaggggctggaggcccctagaaaaagatcagtaagccccagtgtccccccagcccccatgcttatgtgaacatgcgctgtgtgctgcttgctttggaaactgggcctgggtccaggcctagggtgagctcactgtccgtacaaacacaagatcagggctgagggtaaggaaaagaagagactaggaaagctgggcccaaaactggagactgtttgtctttcctggagatgcagaactgggcccgtggagcagcagtgtcagcatcagggcggaagccttaaagcagcagcgggtgtgcccaggcacccagatgattcctatggcaccagccaggaaaaatggcagctcttaaaggagaaaatgtttgagccca

SEQ ID NO: 233 - DNA, 4294 bp, Homo sapiens
gaggcggaagcgcccgcagcccggtaccggctcctcctgggctccctctagcgccttccccccggcccgactccgctggtcagcgccaagtgacttacgcccccgaccctgagcccggaccgctaggcgaggaggatcagatctccgctcgagaatctgaaggtgccctggtcctggaggagttccgtcccagcccgcggtctcccggtactgtcgggccccggccctctggagcttcaggaggcggccgtcagggtcggggagtatttgggtccggggtctcagggaagggcggcgcctgggtctgcggtatcggaaagagcctgctggagccaagtagccctccctctcttgggacagacccctcggtcccatgtccatgggggcaccgcggtccctcctcctggccctggctgctggcctggccgttgcccgtccgcccaacatcgtgctgatctttgccgacgacctcggctatggggacctgggctgctatgggcaccccagctctaccactcccaacctggaccagctggcggcgggagggctgcggttcacagacttctacgtgcctgtgtctctgtgcacaccctctagggccgccctcctgaccggccggctcccggttcggatgggcatgtaccctggcgtcctggtgcccagctcccgggggggcctgcccctggaggaggtgaccgtggccgaagtcctggctgcccgaggctacctcacaggaatggccggcaagtggcaccttggggtggggcctgagggggccttcctgcccccccatcagggcttccatcgatttctaggcatcccgtactcccacgaccagggcccctgccagaacctgacctgcttcccgccggccactccttgcgacggtggctgtgaccagggcctggtccccatcccactgttggccaacctgtccgtggaggcgcagcccccctggctgcccggactagaggcccgctacatggctttcgcccatgacctcatggccgacgcccagcgccaggatcgccccttcttcctgtactatgcctctcaccacacccactaccctcagttcagtgggcagagctttgcagagcgttcaggccgcgggccatttggggactccctgatggagctggatgcagctgtggggaccctgatgacagccataggggacctggggctgcttgaagagacgctggtcatcttcactgcagacaatggacctgagaccatgcgtatgtcccgaggcggctgctccggtctcttgcggtgtggaaagggaacgacctacgagggcggtgtccgagagcctgccttggccttctggccaggtcatatcgctcccggcgtgacccacgagctggccagctccctggacctgctgcctaccctggcagccctggctggggccccactgcccaatgtcaccttggatggctttgacctcagccccctgctgctgggcacaggcaagagccctcggcagtctctcttcttctacccgtcctacccagacgaggtccgtggggtttttgctgtgcggactggaaagtacaaggctcacttcttcacccagggctctgcccacagtgataccactgcagaccctgcctgccacgcctccagctctctgactgctcatgagcccccgctgctctatgacctgtccaaggaccctggtgagaactacaacctgctggggggtgtggccggggccaccccagaggtgctgcaagccctgaaacagcttcagctgctcaaggcccagttagacgcagctgtgaccttcggccccagccaggtggcccggggcgaggaccccgccctgcagatctgctgtcatcctggctgcaccccccgcccagcttgctgccattgcccagatccccatgcctgagggcccctcggctggcctgggcatgtgatggctcctcactgggagcctgtgggggaggctcaggtgtctggagggggtttgtgcctgataacgtaataacaccagtggagacttgcagatgtgacaattcgtccaatcctggggtaatgctgtgtgctggtgccggtcccctgtggtacgaatgaggaaactgaggtgcagagaggttcaggacttgtacaagatcacccagccagaaagaggttgggctgggatttgaaccctggtgtcgtggctctggaagctgccctggcgccttggtgatctgcgtgggtcagtgcacacaggcacacgtcagcctcaaggacatgggcacatctgttcacaggagcagcgccacgtgcctttgagtgccaggaacggggtgggagggtgggagggtgtgagggccagaagactcagaagatgcaaagtgcctgagagagacgggatattcccccagaagaagcattcttagagacacaggcactggacctccttggttcttataagaaacctgtctgaagctgggtgatgagttgcacactccaggtggggctaaggggcctggagcccctgctggctcctaggaaggcacagcagcaggccctgagacggctcctctggggcccctccaccctcccaggcctctgcatttcacctgtgcccacacttctgtctcctgccttcaccttttgacccactactaacgattctccacccagcagacaaagtgatctcttaaaaatatctgttggctgggcacggtggctcacgcctgtaatcccagcactttaggaagccgaggcgggtggatcacctgaggtcgggagttcgagaccagcctgaccaacatggagaaaccccatctctactaaaaatacaaaattagccaggtgtagtggtgcatccctgtaatcccagctacttgggagtctgaggctggagaatcacttgaacctgggaggcggtggttgcagtgagccgagatcgcaccattgcactccagcctgggcaacaagagaaaaactctgtctcaaaaaacaaaaaatctgttaggctgcacacggcgattcactcctgtattcccagtgctttgggaggctgaggtgagaggatgcctgaggccaggaattcagaccagcctgggcaacatagtgagaccccagctctaaagatttgtttttgttttttttttttttttttttttttttttttttttttttttgagacggagtctcgctctgtcgcccaggctagagtgcagtggtaccatctccgctcactgcaacctccgcctcccgggttccagggattctcctgcctcagcctccctagtagctggaactacaggtgtgtgctgccatgcccagctaatttttttttatttaatagagacaagatttcaccatgttggccaggctggtctcaaactcctgacctcaggtgatccacccgcctcagcctcccaaagtgctgggattacaggtgtgaaccaccacacctggccaacaatatttgttttaattagccaggcgtggtagcatttgtcctagcaatttgggaggttgaggtgggagaatcacttcagcccactaggtcgaggctgtagtgagctataattgtaccactgcactccagcctcggggacagagtgagaccctgtctgcaaataaacaaataaaacatcaggctgggcttgagcatctattcctgctcaaaatttcgcaggcttctcagaagaaaatccaaaccccttacagtgacccagtttgcccttgaggcctccacccacacccccttccccccagtcttagggggtggcctggctgttcccttcaacggcaacgctctgcctccattgttggcctcctctgcagggagggactgtctgagcacctgcccgtgtctgtgcagcatggcacactgacgtcaggcccacgtgcatgcccaggtggccagtcacacgccaggtgctccctcagtgttggccaagtgagaggagcacaccttccgggcgttcagacacctccccgtggcagacaccgttcgttgctaccaaacagccacctccttcctaatgggctcccatttttcagtgctgggcaaaggtcccttgatcttggagttgcagcctctttctctccaaggagggcggtgaccagcctgagccagtcaatccagtgattggttcaggagtagcctgtgaccaggagtcctggtagtgaacgactggggcagccctgggggtgaggaccttgcgcagccgtcacaggccctgattggacactgggcagctgctaacccagtgtctccagctgcctacctggagagctccaagcgtaagaaaataaaccctgcctgttgaagcca

SEQ ID NO: 234 - DNA, 3794 bp, Homo sapiens
agtcatgtgacccacacaatggctgagtggctactctcggcttcctggcaacgccgagcgaaagctatgactgcggccgcgggttcggcgggccgcgccgcggtgcccttgctgctgtgtgcgctgctggcgcccggcggcgcgtacgtgctcgacgactccgacgggctgggccgggagttcgacggcatcggcgcggtcagcggcggcggggcaacctcccgacttctagtaaattacccagagccctatcgttctcagatattggattatctctttaagccgaattttggtgcctctttgcatattttaaaagtggaaataggtggtgatgggcagacaacagacggcactgagccctcccacatgcattatgcactagatgagaattatttccgaggatacgagtggtggttgatgaaagaagctaagaagaggaatcccaatattacactcattgggttgccatggtcattccctggatggctgggaaaaggtttcgactggccttatgtcaatcttcagctgactgcctattatgtcgtgacctggattgtgggcgccaagcgttaccatgatttggacattgattatattggaatttggaatgagaggtcatataatgccaattatattaagatattaagaaaaatgctgaattatcaaggtctccagcgagtgaaaatcatagcaagtgataatctctgggagtccatctctgcatccatgctccttgatgccgaactcttcaaggtggttgatgttataggggctcattatcctggaacccattcagcaaaagatgcaaagttgactgggaagaagctttggtcttctgaagactttagcactttaaatagtgacatgggtgcaggctgctggggtcgcattttaaatcagaattatatcaatggctatatgacttccacaatcgcatggaatttagtggctagttactatgaacagttgccttatgggagatgcgggttgatgacggcccaggagccatggagtgggcactacgtggtagaatctcctgtctgggtatcagctcataccactcagtttactcaacctggctggtattacctgaagacagttggccatttagagaaaggaggaagctacgtagctctgactgatggcttagggaacctcaccatcatcattgaaaccatgagtcataaacattctaagtgcatacggccatttcttccttatttcaatgtgtcacaacaatttgccacctttgttcttaagggatcttttagtgaaataccagagctacaggtatggtataccaaacttggaaaaacatccgaaagatttctttttaagcagctggattctctatggctccttgacagcgatggcagtttcacactgagcctgcatgaagatgagctgttcacactcaccactctcaccactggtcgcaaaggcagctacccgcttcctccaaaatcccagcccttcccaagtacctataaggatgatttcaatgttgattacccattttttagtgaagctccaaactttgctgatcaaactggtgtatttgaatattttacaaatattgaagaccctggcgagcatcacttcacgctacgccaagttctcaaccagagacccattacatgggctgccgatgcatccaacacaatcagtattataggagactacaactggaccaatctgactataaagtgtgatgtatacatagagacccctgacacaggaggtgtgttcattgcaggaagagtaaataaaggtggtattttgattagaagtgccagaggaattttcttctggatttttgcaaatggatcttacagggttacaggtgatttagctggatggattatatatgctttaggacgtgttgaagttacagcaaaaaaatggtatacactcacgttaactattaagggtcatttcacctctggcatgctgaatgacaagtctctgtggacagacatccctgtgaattttccaaagaatggctgggctgcaattggaactcactcctttgaatttgcacagtttgacaactttcttgtggaagccacacgctaatacttaacagggcatcatagaatactctggattttcttcccttctttttggttttggttcagagccaattcttgtttcattggaacagtatatgaggcttttgagactaaaaataatgaagagtaaaaggggagagaaatttatttttaatttaccctgtggaagattttattagaattaattccaaggggaaaactggtgaatctttaacattacctggtgtgttccctaacattcaaactgtgcattggccatacccttaggagtggtttgagtagtacagacctcgaagccttgctgctaacactgaggtagctctcttcatcttatttgcaagcggtcctgtagatggcagtaacttgatcatcactgagatgtatttatgcatgctgaccgtgtgtccaagtgagccagtgtcttcatcacaagatgatgctgccataatagaaagctgaagaacactagaagtagctttttgaaaaccacttcaacctgttatgctttatgctctaaaaagtatttttttattttcctttttaagatgatacttttgaaatgcaggatatgatgagtgggatgattttaaaaatgcctctttaataaactacctctaacactatttctgcagtaatagatattagcagattaattgggttatttgcattatttaatttttttgattccaagttttggtcttgtaaccactataactctctgtgaacgtttttccaggtggctggaagaaggaagaaaacctgatatagccaatgctgttgtagtcgtttcctcagcctcatctcactgtgctgtggtctgtcctcacatgtgcactggtaacagactcacacagctgatgaatgcttttctctccttatgtgtggaaggaggggagcacttagacatttgctaactcccagaattggatcatctcctaagatgtacttactttttaaagtccaaatatgtttatatttaaatatacgtgagcgtgttcatcatgttgtatgatttatactaagcattaatgtggctctatgtagcaaatcagttattcatgtaggtaaagtaaatctagaattatttataagaattactcattgaactaattctactatttaggaatttgtaagagtctaacataggcttagctacagtgaagttttgcattgcttttgaagacaagaagataagtgctagaataaataagattacagagaaaattttttgttaaaaccaagtgatttccagctgatgtatctaatattttttaaaacgaacattatagaggtgtaatttatttacaataaaatgttcctactttaaatatacaattcagtgagttttgataaattgatatacccatgtaaccaacactccagtcaagcttcagaatatttccatcaccccagaaggttctcttgtatacctgctcagtcagttcctttcactcccaattgttggcagccattgataggaattctatcactataggttagttttctttgttccagaacatcatgaaagcggcgtcatgtactgtgtattcttatgaatggtttctttccatcagcataatgatttgagatttgtccatgttgtgtgattcagtggtttgttccttcttatttctgaagagttttccattgtatgaatataccacaatttgtttcctccccaccagtttctgatactacaattaaaactgtctacatttacaa

SEQ ID NO: 235 - DNA, 2410 bp, Homo sapiens
agtcagccgactacagagaagggtaatcgggtgtccccggcgccgcccggggccctgagggctggctagggtccaggccgggggggacgggacagacgaaccagccccgtgtaggaagcgcgacaatgccccgctacggagcgtcactccgccagagctgccccaggtccggccgggagcagggacaagacgggaccgccggagcccccggactcctttggatgggcctggtgctggcgctggcgctggcgctggcgctggcgctggctctgtctgactctcgggttctctgggctccggcagaggctcaccctctttctccccaaggccatcctgccaggttacatcgcatagtgccccggctccgagatgtctttgggtgggggaacctcacctgcccaatctgcaaaggtctattcaccgccatcaacctcgggctgaagaaggaacccaatgtggctcgcgtgggctccgtggccatcaagctgtgcaatctgctgaagatagcaccacctgccgtgtgccaatccattgtccacctctttgaggatgacatggtggaggtgtggagacgctcagtgctgagcccatctgaggcctgtggcctgctcctgggctccacctgtgggcactgggacattttctcatcttggaacatctctttgcctactgtgccgaagccgccccccaaaccccctagccccccagccccaggtgcccctgtcagccgcatcctcttcctcactgacctgcactgggatcatgactacctggagggcacggaccctgactgtgcagacccactgtgctgccgccggggttctggcctgccgcccgcatcccggccaggtgccggatactggggcgaatacagcaagtgtgacctgcccctgaggaccctggagagcctgttgagtgggctgggcccagccggcccttttgatatggtgtactggacaggagacatccccgcacatgatgtctggcaccagactcgtcaggaccaactgcgggccctgaccaccgtcacagcacttgtgaggaagttcctggggccagtgccagtgtaccctgctgtgggtaaccatgaaagcacacctgtcaatagcttccctccccccttcattgagggcaaccactcctcccgctggctctatgaagcgatggccaaggcttgggagccctggctgcctgccgaagccctgcgcaccctcagaattggggggttctatgctctttccccataccccggtctccgcctcatctctctcaatatgaatttttgttcccgtgagaacttctggctcttgatcaactccacggatcccgcaggacagctccagtggctggtgggggagcttcaggctgctgaggatcgaggagacaaagtgcatataattggccacattcccccagggcactgtctgaagagctggagctggaattattaccgaattgtagccaggtatgagaacaccctggctgctcagttctttggccacactcatgtggatgaatttgaggtcttctatgatgaagagactctgagccggccgctggctgtagccttcctggcacccagtgcaactacctacatcggccttaatcctggttaccgtgtgtaccaaatagatggaaactactccgggagctctcacgtggtcctggaccatgagacctacatcctgaatctgacccaggcaaacataccgggagccataccgcactggcagcttctctacagggctcgagaaacctatgggctgcccaacacactgcctaccgcctggcacaacctggtatatcgcatgcggggcgacatgcaacttttccagaccttctggtttctctaccataagggccacccaccctcggagccctgtggcacgccctgccgtctggctactctttgtgcccagctctctgcccgtgctgacagccctgctctgtgccgccacctgatgccagatgggagcctcccagaggcccagagcctgtggccaaggccactgttttgctagggccccagggcccacatttgggaaagttcttgatgtaggaaagggtgaaaaagcccaaatgctgctgtggttcaaccaggcaagatcatccggtgaaagaaccagtccctgggccccaaggatgccggggaaacaggaccttctcctttcctggagctggtttagctggatatgggagggggtttggctgcctgtgcccaggagctagactgccttgaggctgctgtcctttcacagccatggagtagaggcctaagttgacactgccctgggcagacaagacaggagctgtcgccccaggcctgtgctgcccagccaggaaccctgtactgctgctgcgacctgatgctgccagtctgttaaaataaagataagagacttggactcca

SEQ ID NO: 236 - DNA, 4760 bp, Homo sapiens
cttcctgaccggcgcgcgcagcctgctgccgcggtcagcgcctgctcctgctcctccgctcctcctgcgcggggtgctgaaacagcccggggaagtagagccgcctccggggagcccaaccagccgaacgccgccggcgtcagcagccttgcgcggccacagcatgaccgctcgcggcctggcccttggcctcctcctgctgctactgtgtccagcgcaggtgttttcacagtcctgtgtttggtatggagagtgtggaattgcatatggggacaagaggtacaattgcgaatattctggcccaccaaaaccattgccaaaggatggatatgacttagtgcaggaactctgtccaggattcttctttggcaatgtcagtctctgttgtgatgttcggcagcttcagacactaaaagacaacctgcagctgcctctacagtttctgtccagatgtccatcctgtttttataacctactgaacctgttttgtgagctgacatgtagccctcgacagagtcagtttttgaatgttacagctactgaagattatgttgatcctgttacaaaccagacgaaaacaaatgtgaaagagttacaatactacgtcggacagagttttgccaatgcaatgtacaatgcctgccgggatgtggaggccccctcaagtaatgacaaggccctgggactcctgtgtgggaaggacgctgacgcctgtaatgccaccaactggattgaatacatgttcaataaggacaatggacaggcaccttttaccatcactcctgtgttttcagattttccagtccatgggatggagcccatgaacaatgccaccaaaggctgtgacgagtctgtggatgaggtcacagcaccatgtagctgccaagactgctctattgtctgtggccccaagccccagcccccacctcctcctgctccctggacgatccttggcttggacgccatgtatgtcatcatgtggatcacctacatggcgtttttgcttgtgttttttggagcattttttgcagtgtggtgctacagaaaacggtattttgtctccgagtacactcccatcgatagcaatatagctttttctgttaatgcaagtgacaaaggagaggcgtcctgctgtgaccctgtcagcgcagcatttgagggctgcttgaggcggctgttcacacgctgggggtctttctgcgtccgaaaccctggctgtgtcattttcttctcgctggtcttcattactgcgtgttcgtcaggcctggtgtttgtccgggtcacaaccaatccagttgacctctggtcagcccccagcagccaggctcgcctggaaaaagagtactttgaccagcactttgggcctttcttccggacggagcagctcatcatccgggcccctctcactgacaaacacatttaccagccatacccttcgggagctgatgtaccctttggacctccgcttgacatacagatactgcaccaggttcttgacttacaaatagccatcgaaaacattactgcctcttatgacaatgagactgtgacacttcaagacatctgcttggcccctctttcaccgtataacacgaactgcaccattttgagtgtgttaaattacttccagaacagccattccgtgctggaccacaagaaaggggacgacttctttgtgtatgccgattaccacacgcactttctgtactgcgtacgggctcctgcctctctgaatgatacaagtttgctccatgacccttgtctgggtacgtttggtggaccagtgttcccgtggcttgtgttgggaggctatgatgatcaaaactacaataacgccactgcccttgtgattaccttccctgtcaataattactataatgatacagagaagctccagagggcccaggcctgggaaaaagagtttattaattttgtgaaaaactacaagaatcccaatctgaccatttccttcactgctgaacgaagtattgaagatgaactaaatcgtgaaagtgacagtgatgtcttcaccgttgtaattagctatgccatcatgtttctatatatttccctagccttggggcacatgaaaagctgtcgcaggcttctggtggattcgaaggtctcactaggcatcgcgggcatcttgatcgtgctgagctcggtggcttgctccttgggtgtcttcagctacattgggttgcccttgaccctcattgtgattgaagtcatcccgttcctggtgctggctgttggagtggacaacatcttcattctggtgcaggcctaccagagagatgaacgtcttcaaggggaaaccctggatcagcagctgggcagggtcctaggagaagtggctcccagtatgttcctgtcatccttttctgagactgtagcatttttcttaggagcattgtccgtgatgccagccgtgcacaccttctctctctttgcgggattggcagtcttcattgactttcttctgcagattacctgtttcgtgagtctcttggggttagacattaaacgtcaagagaaaaatcggctagacatcttttgctgtgtcagaggtgctgaagatggaacaagcgtccaggcctcagagagctgtttgtttcgcttcttcaaaaactcctattctccacttctgctaaaggactggatgagaccaattgtgatagcaatatttgtgggtgttctgtcattcagcatcgcagtcctgaacaaagtagatattggattggatcagtctctttcgatgccagatgactcctacatggtggattatttcaaatccatcagtcagtacctgcatgcgggtccgcctgtgtactttgtcctggaggaagggcacgactacacttcttccaaggggcagaacatggtgtgcggcggcatgggctgcaacaatgattccctggtgcagcagatatttaacgcggcgcagctggacaactatacccgaataggcttcgccccctcgtcctggatcgacgattatttcgactgggtgaagccacagtcgtcttgctgtcgagtggacaatatcactgaccagttctgcaatgcttcagtggttgaccctgcctgcgttcgctgcaggcctctgactccggaaggcaaacagaggcctcaggggggagacttcatgagattcctgcccatgttcctttcggataaccctaaccccaagtgtggcaaagggggacatgctgcctatagttctgcagttaacatcctccttggccatggcaccagggtcggagccacgtacttcatgacctaccacaccgtgctgcagacctctgctgactttattgacgctctgaagaaagcccgacttatagccagtaatgtcaccgaaaccatgggcattaacggcagtgcctaccgagtatttccttacagtgtgttttatgtcttctacgaacagtacctgaccatcattgacgacactatcttcaacctcggtgtgtccctgggcgcgatatttctggtgaccatggtcctcctgggctgtgagctctggtctgcagtcatcatgtgtgccaccatcgccatggtcttggtcaacatgtttggagttatgtggctctggggcatcagtctgaacgctgtatccttggtcaacctggtgatgagctgtggcatctccgtggagttctgcagccacataaccagagcgttcacggtgagcatgaaaggcagccgcgtggagcgcgcggaagaggcacttgcccacatgggcagctccgtgttcagtggaatcacacttacaaaatttggagggattgtggtgttggcttttgccaaatctcaaattttccagatattctacttcaggatgtatttggccatggtcttactgggagccactcacggattaatatttctccctgtcttactcagttacatagggccatcagtaaataaagccaaaagttgtgccactgaagagcgatacaaaggaacagagcgcgaacggcttctaaatttctagccctctcgcagggcatcctgactgaactgtgtctaagggtcggtcggtttaccactggacgggtgctgcatcggcaaggccaagttgaacaccggatggtgccaaccatcggttgtttggcagcagctttgaacgtagcgcctgtgaactcaggaatgcacagttgacttgggaagcagtattactagatctggaggcaaccacaggacactaaacttctcccagcctcttcaggaaagaaacctcattctttggcaagcaggaggtgacactagatggctgtgaatgtgatccgctcactgacactctgtaaaggccaatcaatgcactgtctgtctctccttttaggagtaagccatcccacaagttctataccatatttttagtgacagttgaggttgtagatacactttataacattttatagtttaaagagctttattaatgcaataaattaactttgtacacatttttatataaaaaaacagcaagtgatttcagaatgttgtaggcctcattagagcttggtctccaaaaatctgtttgaaaaaagcaacatgttcttcacagtgttcccctagaaaggaagagatttaattgccagttagatgtggcatgaaatgagggacaaagaaagcatctcgtaggtgtgtctactgggttttaacttatttttctttaataaaatacattgttttcctaagttttggggttaccctatctgctttgagagacaaatacaaaagctaaatggaagaga

SEQ ID NO: 237 - DNA, 821 bp, Homo sapiens
ctttcccgagcttggaacttcgttatccgcgatgcgtttcctggcagctacattcctgctcctggcgctcagcaccgctgcccaggccgaaccggtgcagttcaaggactgcggttctgtggatggagttataaaggaagtgaatgtgagcccatgccccacccaaccctgccagctgagcaaaggacagtcttacagcgtcaatgtcaccttcaccagcaatattcagtctaaaagcagcaaggccgtggtgcatggcatcctgatgggcgtcccagttccctttcccattcctgagcctgatggttgtaagagtggaattaactgccctatccaaaaagacaagacctatagctacctgaataaactaccagtgaaaagcgaatatccctctataaaactggtggtggagtggcaacttcaggatgacaaaaaccaaagtctcttctgctgggaaatcccagtacagatcgtttctcatctctaagtgcctcattgagttcggtgcatctggccaatgagtctgctgagactcttgacagcacctccagctctgctgcttcaacaacagtgacttgctctccaatggtatccagtgattcgttgaagaggaggtgctctgtagcagaaactgagctccgggtggctggttctcagtggttgtctcatgtctctttttctgtcttaggtggtttcattaaatgcagcacttggttagcagatgtttaattttttttttaacaacattaacttgtggcctctttctacacctggaaatttactcttgaataaataaaaactcgtttgtcttgtcttctgca

SEQ ID NO: 238 - DNA, 2938 bp, Homo sapiens
gaaatccaacccggtcacctacccgcgcgactgtgtccacggatggcacgaaagccaagcgagtccccctgccgagctactcgcgtccgcctcctcccaagctgagctctgctccgcccacctgagtccttcgccagttaggaggaaacacagccgcttaatgaactgctgcatcgggctgggagagaaagctcgcgggtcccaccgggcctcctacccaagtctcagcgcgcttttcaccgaggcctcaattctgggatttggcagctttgctgtgaaagcccaatggacagaggactgcagaaaatcaacctatcctccttcaggaccaacgtacagaggtgcagttccatggtacaccataaatcttgacttaccaccctacaaaagatggcatgaattgatgcttgacaaggcaccagtgctaaaggttatagtgaattctctgaagaatatgataaatacattcgtgccaagtggaaaaattatgcaggtggtggatgaaaaattgcctggcctacttggcaactttcctggcccttttgaagaggaaatgaagggtattgccgctgttactgatatacctttaggagagattatttcattcaatattttttatgaattatttaccatttgtacttcaatagtagcagaagacaaaaaaggtcatctaatacatgggagaaacatggattttggagtatttcttgggtggaacataaataatgatacctgggtcataactgagcaactaaaacctttaacagtgaatttggatttccaaagaaacaacaaaactgtcttcaaggcttcaagctttgctggctatgtgggcatgttaacaggattcaaaccaggactgttcagtcttacactgaatgaacgtttcagtataaatggtggttatctgggtattctagaatggattctgggaaagaaagatgtcatgtggatagggttcctcactagaacagttctggaaaatagcacaagttatgaagaagccaagaatttattgaccaagaccaagatattggccccagcctactttatcctgggaggcaaccagtctggggaaggttgtgtgattacacgagacagaaaggaatcattggatgtatatgaactcgatgctaagcagggtagatggtatgtggtacaaacaaattatgaccgttggaaacatcccttcttccttgatgatcgcagaacgcctgcaaagatgtgtctgaaccgcaccagccaagagaatatctcatttgaaaccatgtatgatgtcctgtcaacaaaacctgtcctcaacaagctgaccgtatacacaaccttgatagatgttaccaaaggtcaattcgaaacttacctgcgggactgccctgacccttgtataggttggtgagcacacgtctggcctacagaatgcggcctctgagacatgaagacaccatctccatgtgaccgaacactgcagctgtctgaccttccaaagactaagactcgcggcaggttctctttgagtcaatagcttgtcttcgtccatctgttgacaaatgacagatcttttttttttccccctatcagttgatttttcttatttacagataacttctttaggggaagtaaaacagtcatctagaattcactgagttttgtttcactttgacatttggggatctggtgggcagtcgaaccatggtgaactccacctccgtggaataaatggagattcagcgtgggtgttgaatccagcacgtctgtgtgagtaacgggacagtaaacactccacattcttcagtttttcacttctacctacatatttgtatgtttttctgtataacagccttttccttctggttctaactgctgttaaaattaatatatcattatctttgctgttattgacagcgatataattttattacatatgattagagggatgagacagacattcacctgtatatttcttttaatgggcacaaaatgggcccttgcctctaaatagcactttttggggttcaagaagtaatcagtatgcaaagcaatcttttatacaataattgaagtgttccctttttcataattactctacttcccagtaaccctaaggaagttgctaacttaaaaaactgcatcccacgttctgttaatttagtaaataaacaagtcaaagacttgtggaaaataggaagtgaacccatattttaaattctcataagtagcattcatgtaataaacaggtttttagtttgttcttcagattgatagggagttttaaagaaattttagtagttactaaaattatgttactgtatttttcagaaatcaaactgcttatgaaaagtactaatagaacttgttaacctttctaaccttcacgattaactgtgaaatgtacgtcatttgtgcaagaccgtttgtccacttcattttgtataatcacagttgtgttcctgacactcaataaacagtcactggaaagagtgccagtcagcagtcatgcacgctgattgggtgtgtacatctgtgttggtttggaggaggggggttattatcaagaaatacaagctgaacatcgtatctgaattaaataacaagggttatgtaagtgggttattaaatatgactaaacggtcacaatcttactcttacatgactgataccacctcttaaccagatactatcaacccaatttgcaggtgtttaaaggcagtttttcccccagataggtggtgcttccacaaaactttagtgattccaagattactttagtgaaacgaggaattataagaggatttacattaaaataggatttaattaatgaaaaaaaaactttactcagattttctacctcttacataaatgaagtcaggtcaacttgatgtatttttttgttaatgtaataacctttgatatgcctgatagtaaagaggtgagatgctaa

SEQ ID NO: 239 - DNA, 2496 bp, Homo sapiens
actgcgactcgagacagcggcccggcaggacagctccagaatgaaaatgcggttcttggggttggtggtctgtttggttctctggaccctgcattctgaggggtctggagggaaactgacagctgtggatcctgaaacaaacatgaatgtgagtgaaattatctcttactggggattccctagtgaggaatacctagttgagacagaagatggatatattctgtgccttaaccgaattcctcatgggaggaagaaccattctgacaaaggtcccaaaccagttgtcttcctgcaacatggcttgctggcagattctagtaactgggtcacaaaccttgccaacagcagcctgggcttcattcttgctgatgctggttttgacgtgtggatgggcaacagcagaggaaatacctggtctcggaaacataagacactctcagtttctcaggatgaattctgggctttcagttatgatgagatggcaaaatatgacctaccagcttccattaacttcattctgaataaaactggccaagaacaagtgtattatgtgggtcattctcaaggcaccactataggttttatagcattttcacagatccctgagctggctaaaaggattaaaatgttttttgccctgggtcctgtggcttccgtcgccttctgtactagccctatggccaaattaggacgattaccagatcatctcattaaggacttatttggagacaaagaatttcttccccagagtgcgtttttgaagtggctgggtacccacgtttgcactcatgtcatactgaaggagctctgtggaaatctctgttttcttctgtgtggatttaatgagagaaatttaaatatgtctagagtggatgtatatacaacacattctcctgctggaacttctgtgcaaaacatgttacactggagccaggctgttaaattccaaaagtttcaagcctttgactggggaagcagtgccaagaattattttcattacaaccagagttatcctcccacatacaatgtgaaggacatgcttgtgccgactgcagtctggagcgggggtcacgactggcttgcagatgtctacgacgtcaatatcttactgactcagatcaccaacttggtgttccatgagagcattccggaatgggagcatcttgacttcatttggggcctggatgccccttggaggctttataataaaattattaatctaatgaggaaatatcagtgaaagctggacttgagctgtgtaccaccaagtcaatgattatgtcatgtgaaaatgtgtttgcttcatttctgtaaaacacttgtttttctttcccaggtcttttgtttttttatatccaagaaaatgataactttgaagatgcccagttcactctagtttcaattagaaacatactagctattttttctttaattagggctggaataggaagccagtgtctcaaccatagtattgtctctttaagtcttttaaatatcactgatgtgtaaaaaggtcattatatccattctgtttttaaaatttaaaatatattgactttttgcccttcataggacaaagtaatatatgtgttggaattttaaaattgtgttgtcattggtaaatctgtcactgacttaagcgaggtataaaagtacgcagttttcatgtccttgccttaaagagctctctagtctaacggtcttgtagttagagatctaaatgacattttatcatgttttcctgcagcaggtgcatagtcaaatccagaaatatcacagctgtgccagtaataaggatgctaacaattaattttatcaaacctaactgtgacagctgtgatttgacacgttttaattgctcaggttaaatgaaatagttttccggcgtcttcaaaaacaaattgcactgataaaacaaaaacaaaagtatgttttaaatgctttgaagactgatacactcaaccatctatattcatgagctctcaatttcatggcaggccatagttctacttatctgagaagcaaatccctgtggagactataccactattttttctgagattaatgtactcttggagcccgctactgtcgttattgatcacatctgtgtgaagccaaagccccgtggttgcccatgagaagtgtccttgttcattttcacccaaatgaagtgtgaacgtgatgttttcggatgcaaactcagctcagggattcattttgtgtcttagttttatatgcatccttatttttaatacacctgcttcacgtccctatgttgggaagtccatatttgtctgcttttcttgcagcatcatttccttacaatactgtccggtggacaaaatgacaattgatatgtttttctgatataattactttagctgcactaacagtacaatgcttgttaatggttaatataggcagggcgaatactactttgtaacttttaaagtcttaaacttttcaataaaattgagtgagacttataggcccaaa

SEQ ID NO: 240 - DNA, 2174 bp, Homo sapiens
agtgcagcccgaagccccgcagtccccgagcacgcgtggccatgcgtcccctgcgcccccgcgccgcgctgctggcgctcctggcctcgctcctggccgcgcccccggtggccccggccgaggccccgcacctggtgcatgtggacgcggcccgcgcgctgtggcccctgcggcgcttctggaggagcacaggcttctgccccccgctgccacacagccaggctgaccagtacgtcctcagctgggaccagcagctcaacctcgcctatgtgggcgccgtccctcaccgcggcatcaagcaggtccggacccactggctgctggagcttgtcaccaccagggggtccactggacggggcctgagctacaacttcacccacctggacgggtacctggaccttctcagggagaaccagctcctcccagggtttgagctgatgggcagcgcctcgggccacttcactgactttgaggacaagcagcaggtgtttgagtggaaggacttggtctccagcctggccaggagatacatcggtaggtacggactggcgcatgtttccaagtggaacttcgagacgtggaatgagccagaccaccacgactttgacaacgtctccatgaccatgcaaggcttcctgaactactacgatgcctgctcggagggtctgcgcgccgccagccccgccctgcggctgggaggccccggcgactccttccacaccccaccgcgatccccgctgagctggggcctcctgcgccactgccacgacggtaccaacttcttcactggggaggcgggcgtgcggctggactacatctccctccacaggaagggtgcgcgcagctccatctccatcctggagcaggagaaggtcgtcgcgcagcagatccggcagctcttccccaagttcgcggacacccccatttacaacgacgaggcggacccgctggtgggctggtccctgccacagccgtggagggcggacgtgacctacgcggccatggtggtgaaggtcatcgcgcagcatcagaacctgctactggccaacaccacctccgccttcccctacgcgctcctgagcaacgacaatgccttcctgagctaccacccgcaccccttcgcgcagcgcacgctcaccgcgcgcttccaggtcaacaacacccgcccgccgcacgtgcagctgttgcgcaagccggtgctcacggccatggggctgctggcgctgctggatgaggagcagctctgggccgaagtgtcgcaggccgggaccgtcctggacagcaaccacacggtgggcgtcctggccagcgcccaccgcccccagggcccggccgacgcctggcgcgccgcggtgctgatctacgcgagcgacgacacccgcgcccaccccaaccgcagcgtcgcggtgaccctgcggctgcgcggggtgccccccggcccgggcctggtctacgtcacgcgctacctggacaacgggctctgcagccccgacggcgagtggcggcgcctgggccggcccgtcttccccacggcagagcagttccggcgcatgcgcgcggctgaggacccggtggccgcggcgccccgccccttacccgccggcggccgcctgaccctgcgccccgcgctgcggctgccgtcgcttttgctggtgcacgtgtgtgcgcgccccgagaagccgcccgggcaggtcacgcggctccgcgccctgcccctgacccaagggcagctggttctggtctggtcggatgaacacgtgggctccaagtgcctgtggacatacgagatccagttctctcaggacggtaaggcgtacaccccggtcagcaggaagccatcgaccttcaacctctttgtgttcagcccagacacaggtgctgtctctggctcctaccgagttcgagccctggactactgggcccgaccaggccccttctcggaccctgtgccgtacctggaggtccctgtgccaagagggcccccatccccgggcaatccatgagcctgtgctgagccccagtgggttgcacctccaccggcagtcagcgagctggggctgcactgtgcccatgctgccctcccatcaccccctttgcaatatatttttatattttattattttcttttatatcttggtaccaacgccccctttaaagcggctttgcacaggtca

SEQ ID NO: 241 - DNA, 7580 bp, Homo sapiens
actcgcgctgcggccagcgcccgggcctgcgggcccgggcggcggctgtgttgcgcagtcttcatgggttcccgacgaggaggtctctgtggctgcggcggcggctgctaactgcgccacctgctgcagcctgtccccgccgctctgaagcggccgcgtcgaagccgaaatgccgccaccccggaccggccgaggccttctctggctgggtctggttctgagctccgtctgcgtcgccctcggatccgaaacgcaggccaactcgaccacagatgctctgaacgttcttctcatcatcgtggatgacctgcgcccctccctgggctgttatggggataagctggtgaggtccccaaatattgaccaactggcatcccacagcctcctcttccagaatgcctttgcgcagcaagcagtgtgcgccccgagccgcgtttctttcctcactggcaggagacctgacaccacccgcctgtacgacttcaactcctactggagggtgcacgctggaaacttctccaccatcccccagtacttcaaggagaatggctatgtgaccatgtcggtgggaaaagtctttcaccctgggatatcttctaaccataccgatgattctccgtatagctggtcttttccaccttatcatccttcctctgagaagtatgaaaacactaagacatgtcgagggccagatggagaactccatgccaacctgctttgccctgtggatgtgctggatgttcccgagggcaccttgcctgacaaacagagcactgagcaagccatacagttgttggaaaagatgaaaacgtcagccagtcctttcttcctggccgttgggtatcataagccacacatccccttcagataccccaaggaatttcagaagttgtatcccttggagaacatcaccctggcccccgatcccgaggtccctgatggcctaccccctgtggcctacaacccctggatggacatcaggcaacgggaagacgtccaagccttaaacatcagtgtgccgtatggtccaattcctgtggactttcagcggaaaatccgccagagctactttgcctctgtgtcatatttggatacacaggtcggccgcctcttgagtgctttggacgatcttcagctggccaacagcaccatcattgcatttacctcggatcatgggtgggctctaggtgaacatggagaatgggccaaatacagcaattttgatgttgctacccatgttcccctgatattctatgttcctggaaggacggcttcacttccggaggcaggcgagaagcttttcccttacctcgacccttttgattccgcctcacagttgatggagccaggcaggcaatccatggaccttgtggaacttgtgtctctttttcccacgctggctggacttgcaggactgcaggttccacctcgctgccccgttccttcatttcacgttgagctgtgcagagaaggcaagaaccttctgaagcattttcgattccgtgacttggaagaggatccgtacctccctggtaatccccgtgaactgattgcctatagccagtatccccggccttcagacatccctcagtggaattctgacaagccgagtttaaaagatataaagatcatgggctattccatacgcaccatagactataggtatactgtgtgggttggcttcaatcctgatgaatttctagctaacttttctgacatccatgcaggggaactgtattttgtggattctgacccattgcaggatcacaatatgtataatgattcccaaggtggagatcttttccagttgttgatgccttgagttttgccaaccatggatggcaaatgtgatgtgctcccttccagctggtgagaggaggagttagagctggtcgttttgtgattacccataatattggaagcagcctgagggctagttaatccaaacatgcatcaacaatttggcctgagaatatgtaacagccaaaccttttcgtttagtctttattaaaatttataattggtaattggaccagttttttttttaatttccctctttttaaaacagttacggcttatttactgaataaatacaaagcaaacaaactcaagttatgtcatacctttggatacgaagaccatacataataaccaaacataacattatacacaaagaatactttcattatttgtggaatttagtgcatttcaaaaagtaatcatatatcaaactaggcaccacactaagttcctgattattttgtttataatttaataatatatcttatgagccctatatattcaaaatattatgttaacatgtaatccatgtttctttttcaaatctaaagttaaaaaaaaatagcagaagccagtgtcttaaagtctatcttttgtttctaagaccatgggatttcataatctcaagataaaatatgtatgaagtaattaatgtagaatttttacaccaaataataaataatgcttaataaactagagatatgagatgtgtaggaaatttggttaaacttttttcagatactttctggcccaaataataatttgttagcaaataatatgacccttgaactcaatggccatctattaaaagactgttgttcacactggaaaacatttaaagatgtgactatatccatgggtggattgaatcactcaaaatatattagtatccttctttagggatggttggttacagacatgtatttattcaggaggcagaaaatattccattttaattgcttattaaagaaaacattaaattctaaattattttgaggactgtgaagacttttcattagtgtaatattaggtcattgtcaatctcccagaatgtagttctatattctctaaatatgaaagtatccagaaaggccagtggtagtaaaaagcttagtgtatataatctcaaaagggatggaatatttacaactcatatttataacatgttgaatcttctcagttatcagtagtcatcagaagtgtcaatagctttctaaataaatattaaatatctactgtcctgtagtgaaggagtaatttttagtaattttctctttacaaagtctccagtgtttccaggtaaatatttgtgaaacaaaatacagcaaactacattgttacttcagtgtattgttgccaaaaatgacaagatattatattaaaatcagtaaattttagacagattttaaaaattaattagcctacaatagaggttatatggtaacacggtgatcttctaagcagttaagtgactgactgttctggcaacaacgacttctccgtgactgaagggccctgttcatttcctgatcctgaagctcgtctctcttttgagcctccgcttgctttggtcgatggtttccctcagctttttctttgctgttcttcatcctcgttgttgctgtcatcatgttcactgtggcttttacaatacagcctgtaaattccttatgacatagttcagtgcatttggctttattgcctgctccacagttctttacctttacttggcttagagaaactgtatctttgttgcttcatataacctttccccaaccccactaagctggacataacttattagtggtcctcccgtcactttatttgtagaaatctctctttcacatgagcaggggttctttcatgtggtttagctgacagcagaactagtgattctagacattttgcatggccctcattcagtggctcacaaacatgagggagcatcagaactacttgaggggcttgttaaaacccagtgcgttagaagtcggatgcggtggctcacacctgtaatcccagcactttgggaggcccaggcaggcggatcacttgaggttaggagttcaagaccagcctggccaacatggtgaaaccccgtctctactaaaaatacaaaagttagccgggtgtggtggtgcatgcctgtaatcccagcttcttgggaggccaaggcacaagaatcgcttgaaccaggagacggaggtttcagtgaatgaagatcgtgccattgtattccagcctcggcaacacagcaggactgtgattttctttggagactcctagattttctgtggttttgaactgaatttgttggatgttggcaagtgcctcttatgagctgtttctttatcctgcatttgccccacaaagacttatctggaggtgagcaaagtatgtttggtagtgaggtcacaaaggcaatcagccccttcctccccactcccattgccatcttctcagtccttctccctttctttccaagtagtttacccacccctcctctttcctcccctgtccctaaaataatccacgtgtcttcctaaaatctctctttgatcctgtcctttgataacaccgtcagtgcctactactgggtctagacagacctctgttgagcagtcagagtcttccctgactccacaatgcccctttccttggctgaccagtatgactactggtccccacctttcccttgcctatccctacctccctcctactaggttgtcccatccctctcttcacccattcattcatgaccatttttcactaccaagctccccccctcccgaaggaggctgaggtttttgtgactctctagactctattgtgggatggaatgaacattgctaaagaatcttgtgttcgctttactttaaaaaggtatttttttcctaattataaaactgatgtgtcagttacggaaaaattagaaatgcagcacaaatacatgaatattttaccacaaaattgccatataatatcttgtcttttttgggggtgtgaattttttgcattgttctggtcatattctttatcatgtaatttatgttcttttttactaagtattatgtgtggttattatagattttcacaaagatatattgctggtaatatattttattgtgtagtcttataatttacttaaccttctttcaattgttagaaatttaggctatttccagattttcagtattgtaaataatgctgtgatgaccaattttgtgaataaaatgtttttatgtatttcagattattcccttaggatagtctctcagtgccaagttgtcaaaaacatctctattttgcttatcttcctgctctcttgctgccttagggggtagtaaactgaaacataaagtaaacatgcatacaaataaaaaacataaaacaaaaataagcaacctgatggtaataggtgaaagtggtaacctgttttaactttgaattcttgccgggcgcggtggctcacgcctgtaatcccagcactttgggaggctgaggcgggtggatcacgaggtcaggagttcaaaaccagcctggccaagatggtgaaatcccgtctctactaaaaatacaaaaattagccgggcgtggtggcgggcgcctgtaatcccagctacttgggaggctgaggcagagaattgcttgaacccaggaggcggaggttgcagtgagccaagatcgcgccactgcactccagcctgggtgacagagcgagactccgtctcaaataaaaaacaacaaaaaacaaaaaaaacttaaaattctttgcttgttagtgaccttgatcatggttctctttgtacgatagttgggcatctgtatttccacttgtgtgaatttgcctttaaattttggttatgggtttcaccttttaaaataatcaaacatatttatcttttcctgtgtgataggtttttttctgtatcttttcctgttaaacacacagacccctccccaatctggacattgaataaatattcattttcctttgcattgtttggggtttggttttatgcttactgtgtctctccaccccattatcagagtaatatatgctcattgcataaaatctggaacatgtgaaaactggagatgaaaagaagcccagcatttgagacatacccactgctgacatttgtatatttcctttcattcttttacctgcctaaagacatatatgcagatatggacatatttagctttacatacatgcagactaccacatataatctatatcttgtttttttgatctaacacaatgttagcttggttttttatgtcattgacagttcttgattaacagctgtaatggctgcacagccctgcttcattaatttttttttttggactgaaatgtatgtaccacgttccgcttatccattcatccaccagtgaccacttgggtcatttctaccttttggccattgcaataatgttgctgtcaacaaggatgtacaaatatctgttcgagtccctgctcttaattgttttgggtatacacccaacctacattaatctttaatcacttaagatgttggggtttgtgctgggaggtaaccaagtgactctggagcagcctcaccctagctacagagggaaactgactcttccctctctgcccaatcttttgccgcctgtcaggttcccaagctgtccataccttactgtgtgaagcgctttgggtataaactcccaaatagaggctcagccccttttcctttcccaagtccatcctgcaggttatagctcttcagaggaatctcttgaattctggcctgggatctgggattaaagtagaacccagggtgtcccttggggccttaggcatagcccgttgtggtggaacctgccatcagccccactgcactcagtggtcccctggtacttcaggacagtttctctcttctgcacatgagaacttcaagcagagaggactgtcagttgttgccttcacatcaccaatcgtttggccataatggccaagagccctcactgctcttgggtcttgcctttccacatgttactgaaagctcccgttggtgtccctgtccactaactcacctgatgggacagatgccactttcctctgagtgtctgataaaacacagtctgttgtggggagcccacgctcaagggttttctttgggatcagagtttcccggctattactccatgccctgcctgacatcactgtcatgtatggtgctaatcaccaaaggatgcccttgtttgattctggattctaggtgatagtccttatcctctgatgggggaagagtttgggtgggagagaacaaaccgacaagttggttccagatgaggtggctgggagccaaccctcaggtacttggctctgagtaatgtgacggcccaggcaagagggctcccactgccaatgaggaacaaaagctcaaggtctagtagtgtattcagcacatgctaggaaacaagagttgggacgtggacaaggagaggagcaaaggccaggggttaactgcttttggtttttcctctataaaagtcagggactatgatttatatgggtgagaaggtttggagtaggactgaagctgccatttacaaaccccttgccctaatttattgtagttttgggtgtgtttctgaaagaaccttttgcaggtgatttttattcagtactcattaacttacagcttttatgaattcacatcttctacactattgaaaaacataagtttgtattgtgttaagtgcagcatgagttattatatgaataaatcacattaaatttgcca

SEQ ID NO: 242 - DNA, 2705 bp, Homo sapiens
gagtccgagccgccgccgccatgagctgccccgtgcccgcctgctgcgcgctgctgctagtcctggggctctgccgggcgcgtccccggaacgcactgctgctcctcgcggatgacggaggctttgagagtggcgcgtacaacaacagcgccatcgccaccccgcacctggacgccttggcccgccgcagcctcctctttcgcaatgccttcacctcggtcagcagctgctctcccagccgcgccagcctcctcactggcctgccccagcatcagaatgggatgtacgggctgcaccaggacgtgcaccacttcaactccttcgacaaggtgcggagcctgccgctgctgctcagccaagctggtgtgcgcacaggcatcatcgggaagaagcacgtggggccggagaccgtgtacccgtttgactttgcgtacacggaggagaatggctccgtcctccaggtggggcggaacatcactagaattaagctgctcgtccggaaattcctgcagactcaggatgaccggcctttcttcctctacgtcgccttccacgacccccaccgctgtgggcactcccagccccagtacggaaccttctgtgagaagtttggcaacggagagagcggcatgggtcgtatcccagactggaccccccaggcctacgacccactggacgtgctggtgccttacttcgtccccaacaccccggcagcccgagccgacctggccgctcagtacaccaccgtcggccgcatggaccaaggagttggactggtgctccaggagctgcgtgacgccggtgtcctgaacgacacactggtgatcttcacgtccgacaacgggatccccttccccagcggcaggaccaacctgtactggccgggcactgctgaacccttactggtgtcatccccggagcacccaaaacgctggggccaagtcagcgaggcctacgtgagcctcctagacctcacgcccaccatcttggattggttctcgatcccgtaccccagctacgccatctttggctcgaagaccatccacctcactggccggtccctcctgccggcgctggaggccgagcccctctgggccaccgtctttggcagccagagccaccacgaggtcaccatgtcctaccccatgcgctccgtgcagcaccggcacttccgcctcgtgcacaacctcaacttcaagatgccctttcccatcgaccaggacttctacgtctcacccaccttccaggacctcctgaaccgcaccacagctggtcagcccacgggctggtacaaggacctccgtcattactactaccgggcgcgctgggagctctacgaccggagccgggacccccacgagacccagaacctggccaccgacccgcgctttgctcagcttctggagatgcttcgggaccagctggccaagtggcagtgggagacccacgacccctgggtgtgcgcccccgacggcgtcctggaggagaagctctctccccagtgccagcccctccacaatgagctgtgaccatcccaggaggcctgtgcacacatcccaggcatgtcccagacacatcccacacgtgtccgtgtggccggccagcctggggagtagtggcaacagcccttccgtccacactcccatccaaggagggttcttccttcctgtggggtcactcttgccattgcctggagggggaccagagcatgtgaccagagcatgtgcccagcccctccaccaccaggggcactgccgtcatggcaggggacacagttgtccttgtgtctgaaccatgtcccagcacgggaattctagacatacgtggtctgcggacagggcagcgcccccagcccatgacaagggagtcttgttttctggcttggtttggggacctgcaaatgggaggcctgaggccctcttcaggctttggcagccacagatacttctgaacccttcacagagagcaggcaggggcttcggtgccgcgtgggcagtacgcaggtcccaccgacactcacctgggagcacggcgcctggctcttaccagcgtctggcctagaggaagcctttgagcgacctttgggcaggtttctgcttcttctgttttgccccatggtcaagtccctgttccccaggcaggtttcagctgattggcagcaggctccctgagtgatgagcttgaacctgtggtgtttctgggcagaagcttatcttttttgagagtgtccgaagatgaaggcatggcgatgcccgtcctctggcttgggttaattcttcggtgacactggcattgctgggtggtgatgcccgtcctctggcttgggttaattcttcggtgacactggcgttgctgggtggcaatgcccatcctctgccttgggttaattcttcggtgacactggcgttgctgggtggcgatgcccgtcctctggcttgggttaattcttggatgacgtcggcgttgctgggagaatgtgccgttcctgccctgcctccacccacctcgggagcagaagcccggcctggacacccctcggcctggacacccctcgaaggagagggcgcttccttgagtaggtgggctccccttgcccttccctccctatcactccatactggggtgggctggaggaggccacaggccagctattgtaaaagctttttattttagtaaaatatacagaagttctttttctgaactca

SEQ ID NO: 243 - DNA, 2475 bp, Homo sapiens
ctggccgtcgcgggacccgcaggactgagaccatggaggcggtggcggtggccgcggcggtgggggtccttctcctggccggggccgggggcgcggcaggcgacgaggcccgggaggcggcggccgtgcgggcgctcgtggcccggctgctggggccaggccccgcggccgacttctccgtgtcggtggagcgcgctctggctgccaagccgggcttggacacctacagcctgggcggcggcggcgcggcgcgcgtgcgggtgcgcggctccacgggcgtggcggccgccgcggggctgcaccgctacctgcgcgacttctgtggctgccacgtggcctggtccggctctcagctgcgcctgccgcggccactgccagccgtgccgggggagctgaccgaggccacgcccaacaggtaccgctattaccagaatgtgtgcacgcaaagctactctttcgtgtggtgggactgggcccgctgggagcgagagatagactggatggcgctgaatggcatcaacctggcactggcctggagcggccaggaggccatctggcagcgggtgtacctggccttgggcctgacccaggcagagatcaatgagttctttactggtcctgccttcctggcctgggggcgaatgggcaacctgcacacctgggatggccccctgcccccctcctggcacatcaagcagctttacctgcagcaccgggtcctggaccagatgcgctccttcggcatgaccccagtgctgcctgcattcgcggggcatgttcccgaggctgtcaccagggtgttccctcaggtcaatgtcacgaagatgggcagttggggccactttaactgttcctactcctgctccttccttctggctccggaagaccccatattccccatcatcgggagcctcttcctgcgagagctgatcaaagagtttggcacagaccacatctatggggccgacactttcaatgagatgcagccaccttcctcagagccctcctaccttgccgcagccaccactgccgtctatgaggccatgactgcagtggatactgaggctgtgtggctgctccaaggctggctcttccagcaccagccgcagttctgggggcccgcccagatcagggctgtgctgggagctgtgccccgtggccgcctcctggttctggacctgtttgctgagagccagcctgtgtatacccgcactgcctccttccagggccagcccttcatctggtgcatgctgcacaactttgggggaaaccatggtctttttggagccctagaggctgtgaacggaggcccagaagctgcccgcctcttccccaactccaccatggtaggcacgggcatggcccccgagggcatcagccagaacgaagtggtctattccctcatggctgagctgggctggcgaaaggacccagtgccagatttggcagcctgggtgaccagctttgccgcccggcggtatggggtctcccacccggacgcaggggcagcgtggaggctactgctccggagtgtgtacaactgctccggggaggcctgcaggggccacaatcgtagcccgctggtcaggcggccgtccctacagatgaataccagcatctggtacaaccgatctgatgtgtttgaggcctggcggctgctgctcacatctgctccctccctggccaccagccccgccttccgctacgacctgctggacctcactcggcaggcagtgcaggagctggtcagcttgtactatgaggaggcaagaagcgcctacctgagcaaggagctggcctccctgttgagggctggaggcgtcctggcctatgagctgctgccggcactggacgaggtgctggctagtgacagccgcttcttgctgggcagctggctagagcaggcccgagcagcggcagtcagtgaggccgaggccgatttctacgagcagaacagccgctaccagctgaccttgtgggggccagaaggcaacatcctggactatgccaacaagcagctggcggggttggtggccaactactacacccctcgctggcggcttttcctggaggcgctggttgacagtgtggcccagggcatccctttccaacagcaccagtttgacaaaaatgtcttccaactggagcaggccttcgttctcagcaagcagaggtaccccagccagccgcgaggagacactgtggacctggccaagaagatcttcctcaaatattacccccgctgggtggccggctcttggtgatagattcgccaccactgggccttgttttccgctaattccagggcagattccagggcccagagctggacagacatcacaggataacccaggcctgggaggaggccccacggcctgctggtggggtctgacctggggggattggagggaaatgacctgccctccaccaccacccaaagtgtgggattaaagtactgttttctttccacttaaa

SEQ ID NO: 244 - DNA, 5227 bp, Homo sapiens
gggcaggcaagggcggccgagcgggcggcgggcatgagcggggcgggcagggcgctggccgcgctgctgctggccgcgtccgtgctgagcgccgcgctgctggcccccggcggctcttcggggcgcgatgcccaggccgcgccgccacgagacttagacaaaaaaagacatgcagagctgaagatggatcaggctttgctactcatccataatgaacttctctggaccaacttgaccgtctactggaaatctgaatgctgttatcactgcttgtttcaggttctggtaaacgttcctcagagtccaaaagcagggaagcctagtgctgcagctgcctctgtcagcacccagcacggatctatcctgcagctgaacgacaccttggaagagaaagaagtttgtaggttggaatacagatttggagaatttggaaactattctctcttggtaaagaacatccataatggagttagtgaaattgcctgtgacctggctgtgaacgaggatccagttgatagtaaccttcctgtgagcattgcattccttattggtcttgctgtcatcattgtgatatcctttctgaggctcttgttgagtttggatgactttaacaattggatttctaaagccataagttctcgagaaactgatcgcctcatcaattctgagctgggatctcccagcaggacagaccctctcgatggtgatgttcagccagcaacgtggcgtctatctgccctgccgccccgcctccgcagcgtggacaccttcagggggattgctcttatactcatggtctttgtcaattatggaggaggaaaatattggtacttcaaacatgcaagttggaatgggctgacagtggctgacctcgtgttcccgtggtttgtatttattatgggatcttccatttttctatcgatgacttctatactgcaacgggggtgttcaaaattcagattgctggggaagattgcatggaggagtttcctgttaatctgcataggaattatcattgtgaatcccaattattgccttggtccattgtcttgggacaaggtgcgcattcctggtgtgctgcagcgattgggagtgacatactttgtggttgctgtgttggagctcctctttgctaaacctgtgcctgaacattgtgcctcggagaggagctgcctttctcttcgagacatcacgtccagctggccccagtggctgctcatcctggtgctggaaggcctgtggctgggcttgacattcctcctgccagtccctgggtgccctactggttatcttggtcctgggggcattggagattttggcaagtatccaaattgcactggaggagctgcaggctacatcgaccgcctgctgctgggagacgatcacctttaccagcacccatcttctgctgtactttaccacaccgaggtggcctatgaccccgagggcatcctgggcaccatcaactccatcgtgatggcctttttaggagttcaggcaggaaaaatactattgtattacaaggctcggaccaaagacatcctgattcgattcactgcttggtgttgtattcttgggctcatttctgttgctctgacgaaggtttctgaaaatgaaggctttattccagtaaacaaaaatctctggtccctttcgtatgtcactacgctcagttcttttgccttcttcatcctgctggtcctgtacccagttgtggatgtgaaggggctgtggacaggaaccccattcttttatccaggaatgaattccattctggtatatgtcggccacgaggtgtttgagaactacttcccctttcagtggaagctgaaggacaaccagtcccacaaggagcacctgactcagaacatcgtcgccactgccctctgggtgctcattgcctacatcctctatagaaagaagattttttggaaaatctgatggctcccactgagatgtgctgctggaagactctagtaggcctgcagggaggactgaagcagcctttgttaaagggaagcattcattaggaaattgactggctgcgtgtttacagactctgggggaagacactgatgtcctcaaactggttaactgtgacacggctcgccagaactctgcctgtctatttgtgacttacagatttgaaatgtaattgtcttttttcctccatcttctgtggaaatggatgtctttggaacttcattccgaggagataagctttaactttccaaaagggaattgccatgggtgtttttcttctgtggtgagtgaaacaatctgaggtctggttcttgctgaccttgttgccctgcaaacttcctttccacgtgtacgcgcacaccaacacgaaatgccatcactcctactgcggctgctatgaagcttactggttgtgatgtgttataatttagtctgtttttttgattgaatgcagtttaatgtttccagaaagccaaagtaattttcttttcagatatgcaaggctttggtgggtccaaaaaatgtctatcacaagccattttttccttttcctctctcgaaaagttaaaatatctatgtgttattcccaaaccctcttacctatgtatctgcctgtctgtccatcatcttccttcctccctatctctgtgtatctggatggcagccgctgcccaggggagtggctgtggggagggcaggtactgtctttgcctgtgggtccagctgagccatccctgctgggtgatgctgggcaagacccttggcccgtctgggccttggcttcctcacttgtgaaatgagcgggaagatgactctcagttccttccacctcttagacatggtgaggtaacagacatcaaaagcttttctgaaatcttcagaagaaatagttccattacagaaaactcttcaaaataaatagtagtgaaaacttttaaaaactctcattggagtaagtcttttcaagatgatcctccacaatggaggcagcgttcctacttgtcatcacacagctgaagacattgtttcttaggtgtgaaatcggggacaaaggacaaacagagacacacggcattgttcatgggaggcatcgtcaccctcctgggtgttctgtgggaatttcctgtgtgaggaaaacgtggccacagggttgtgctgtacccacccttccccggcgagatggccctcggcctgtgccgctgcttccaccctcgccactccatggcagcttttggtctgtttccggctctgccctctgccctgaactctcatccggcttgtacctgcctgctggacccctccacctggaggccagcccatgtctcaggcccagccctagcctcttctcctcaaattctaagtgttttctctttaggtttccctggctttgtgaatggatcatgtgtctctaggtataaacctgacatcatctttccacccggcttacctccaccagatctccccagttctgtctccatcttctacctgcagctgctctgttctcatggtcactgctgcatcactgagtctggacccttgttatcattttcaaactggcctccttccctcgttccccacttcttaaagtcacctgtccattgccaccagattaagctttctccagccagatcacctctctctgagaaacctccattgacatggaaacaccattgtctggcacacatactcacatactcaccttcccgtcttgatccccacacatctttccagcctcccctcccactccactccctgctctctcctccacctccccatcctcttgtctcccctcccctctgaatccagcccagcggggcttctcctgcctccatcacatcacagaagtacctcctgcttctggttttaattagagccttccccgattacattttcctctgaattttttcctatctacatttgatctgtcatgtttaaaccccctacttctaagggaacttctctaatctcttatcctcatccccaaatagtgttttcttcctctgggttcttataatgttggtatcaatctcacagcatttagtgcttcctgcctggtgtgacagttacctgtgtgcatgtgcaatttctaatttcccacgctagactgtgagcttcctaaggcaagaatcatgccttgttggtttctgtattcctcatggtgccaaacacagtgccttctacattgcaggcgctgaataaacatttttaaagcaaaatgatgtggatttttaaaataaatatttaagtgctggtaagatgagcatgtatccggggtgcccatgaaatgttcttggggccgtgtggggacagtcgtcattcctcctcctgccacccttttctttcagtgagtcactgtggatggtcccagctgtgtcatcccaaagttcagcagggaaagctgagctgggcctctccaggtgagttttctagaagcatttctcaaactgtgggttacatcaacttgggtgtcttgagctgtaaggaaggaactccggagtcagctgggctacaggggagcttctctaagtcctgcgggaggccagacccagcctgagcttgctgttagctagcggaggcagctgctggtggcccaggtgctcgacaccaggcatcccctctcctcccacgaagggtgtgccataatccccttcaacaggaaatgcttcccagaagcctctcagcagcctcccctcctgtcctatcagctagaagcgcctcgcttgtcccaagaccagcagggacagggaactgtccgagcccgtggctgtgtggaggaaggcgacccccagcacaagattggtttcctttgggaagggaagagggagtgtgttggggtaaggggtagagcagaggaatggtcagggggcaacaaccgctgacagctgcaacaggtgcatggcatctcacagggaggcagggaggtgcgagctcctaagtaatggagcaaaaaaattctattctgtagaatggggagagaaaatgtgacattttaatttttttttgcatttatattcctaattcctacttaaagtgaatatactgccgctgtagatcataaaatgtatcttttccatggccaacaaggggcatcttttataaatgcataataacccagtttgtatcaaagggtatcgacttaagtgaaatttcaacatgctgttactttttccttttaatgtaattctgttttccaaataaatgggggagacaaatggactttgagtaaatttcttagcatatcaaa

SEQ ID NO: 245 - DNA, 5081 bp, Homo sapiens
gtctgactccagccaccggccttcaaggcacggctttttattccttcggctggtcggcctctcgcccttcagctacctgtgcgtccctccgtcccgtcccgtcccggggtcaccccggagcctgtccgctatgcggctcctgcctctagccccaggtcggctccggcggggcagcccccgccacctgccctcctgcagcccagcgctgctactgctggtgctgggcggctgcctgggggtcttcggggtggctgcgggaacccggaggcccaacgtggtgctgctcctcacggacgaccaggacgaagtgctcggcggcatgacaccgctaaagaaaaccaaagctctcatcggagagatggggatgactttttccagtgcttatgtgccaagtgctctctgctgccccagcagagccagtatcctgacaggaaagtacccacataatcatcacgttgtgaacaacactctggaggggaactgcagtagtaagtcctggcagaagatccaagaaccaaatactttcccagcaattctcagatcaatgtgtggttatcagaccttttttgcagggaaatatttaaatgagtacggagccccagatgcaggtggactagaacacgttcctctgggttggagttactggtatgccttggaaaagaattctaagtattataattacaccctgtctatcaatgggaaggcacggaagcatggtgaaaactatagtgtggactacctgacagatgttttggctaatgtctccttggactttctggactacaagtccaactttgagcccttcttcatgatgatcgccactccagcgcctcattcgccttggacagctgcacctcagtaccagaaggctttccagaatgtctttgcaccaagaaacaagaacttcaacatccatggaacgaacaagcactggttaattaggcaagccaagactccaatgactaattcttcaatacagtttttagataatgcatttaggaaaaggtggcaaactctcctctcagttgatgaccttgtggagaaactggtcaagaggctggagttcactggggagctcaacaacacttacatcttctatacctcagacaatggctatcacacaggacagttttccttgccaatagacaagagacagctgtatgagtttgatatcaaagttccactgttggttcgaggacctgggatcaaaccaaatcagacaagcaagatgctggttgccaacattgacttgggtcctactattttggacattgctggctacgacctaaataagacacagatggatgggatgtccttattgcccattttgagaggtgccagtaacttgacctggcgatcagatgtcctggtggaataccaaggagaaggccgtaacgtcactgacccaacatgcccttccctgagtcctggcgtatctcaatgcttcccagactgtgtatgtgaagatgcttataacaatacctatgcctgtgtgaggacaatgtcagcattgtggaatttgcagtattgcgagtttgatgaccaggaggtgtttgtagaagtctataatctgactgcagacccagaccagatcactaacattgctaaaaccatagacccagagcttttaggaaagatgaactatcggttaatgatgttacagtcctgttctgggccaacctgtcgcactccaggggtttttgaccccggatacaggtttgacccccgtctcatgttcagcaatcgcggcagtgtcaggactcgaagattttccaaacatcttctgtagcgacctcacacagcctctgcagatggatccctgcacgcctctttctgatgaagtgattgtagtaggtgtctgtagctagtcttcaagaccacacctggaagagtttctgggctggctttaagtcctgtttgaaaaagcaacccagtcagctgacttcctcgtgcaatgtgttaaactgtgaactctgcccatgtgtcaggagtggctgtctctggtctcttcctttagctgacaaggacactcctgaggtctttgttctcactgtattctttttatcctggggccacagttcttgattattcctcttgtggttaaagactgaatttgtaaacccattcagataaatggcagtactttaggacacacacaaacacacagacacaccttttgatatgtaagcttgacctaaagtcaaaggacctgtgtagcatttcagattgagcacttcactatcaaaaatactaacatcacatggcttgaagagtaaccatcagagctgaatcatccaagtaagaacaagtaccattgttgattgataagtagagatacattttttatgatgttcatcacagtgtggtaaggttgcaaattcaaaacatgtcacccaagctctgttcatgtttttgtgaattctaggctggtgctgcactgaaatagagcagtaagcttgtgataaaggccaattccaggtagctcttgaaggtgatagccatctactttccagtggctgccaaccacagggagtgccagttaacactggaaggattaaggcaaggtcccttctcttgagactcccctctgagatctgaaaaatgaagtggcttaggaacatcagcagtgaagaactgccaagagttggtgaaggttgtctcttccgagggccttctgaagacagggctcttgaacagacaagtggaagggctgtaccagggataaaggaaagaagtgcctgtccagcagggagcttgaatttaagttccatgtatgaagtcattggctctatctgcatttttctgtcattctcttcatttgttttaaggtggaaaattttcttacagttgatgcaaagtatcaactactttaccctaccttctccccttttagatgggttcttcctgagttttggagtcttgtatgattatcagtattcccctgtcaaaatcaaatctattcaggtttcttcactgttgagaacacctaaatgtttttatttttgagaagtggggacagagtctcactatgtcacccaggctggagtgcaatggcatgatctcagctcactgcaaccttcgcctcctgggttcaagcgattctcctgcctccgcctcctgagtagctgggattataggcacgcaccaccacgcccagctaattttttgtatttttagtagagacagagtttcaccatgttggccaggctggtcttgaactcctgaccttgtgatccacccacctcggcctcccagagtgctgggattacaggcatgagccaccacgcttggctaagaacacctaaatttttatgtttcttggctcaaaaaccagttccatttctaatgttgtcctcacaagaaggctaattggtggtgagacagcaggggaggaggaagagctgtggtttgtaacttgttcaactcaggcaataagcgattttagctttatttaaagtcttctgtccagctttaagcactttgtaagacatggctgaaagtagcttttctatcagaattgcagatagtcatgttgggctaacagtcaattggatatattcctttacctcacatgaccccagcaactgtggtggtatctagaggtgaaacaggcaagtgaaatggacacctctgctgtgaatgttttagagaaggaaattcaaaaaatgttgtaactgaaagcactgttgaatatgggtatcggctttctttttcactttgactcttaacattatcagtcaacttccacattaatgaaagttgaccatagttatttccaaataaaaagaaaccaactcttaccaggtcttggactgtgatgtcatattattcagttttatgcttgttcctgagcagaactcataagagtgacatagtcagctgctgacggcacctcagccacgccactcttactcagttcagtgggtgtgcttgcgtggtaggatgtggtgcagccctctctacgctcttctatttttggtatatttcctatctaaccttcaaatagcttccaattctttttttcttggactggcttcattctgaatttgtgctaaaataatctttcataaagagacctcagtttatagcgtaacagactacacaatgcactgatgttttcataatgtttaagggacccactgcaagaagcttgctgcctccttttaattgtattcatttagattttgattttccatgttaagaaggtgaggtccatgttggtgcccttcagagtagagaaccatgtaaacattaggaatgaacagaggccttaggaatgaatagagagtttgccttatacaatttcctgttacaaagctctccctctcatgcaaagtagggaacaccttttgagcatctttgaatttgacaaatggtgctgttgcaaacactttttttttgagatgaagtctcgcggttgtcacccgggctggagtgcagtggcgtgatctcggctcactgcaacttccacctcctgggttccagcagttctcctgcctcagcctcccaagtagctgagattacaggcgcctgccaccccacctggctgatttttgtaattttagtagagacggggtttcaccatgttggccaggctgattaactcctgacctcaggtgatccacctttctcggcctcccaaagtgctgggattacgggtgtgagccaccgtgcccggcctgcaaacacattttaattgacaacactagggctgttgtacaaaatagtaatgatagccatggaagttttaccttattctgtgagaagtgttcttaaacttattaagtgtctaaactaaggtttagtgcttttttaaaggaaagttgtcccaggattcatcctaaagaaagcaaaagttaattcaactgatccaccaatggaattagatgggtagagttgggttcttgagttttaccaccacttagttcccactgaattttgtaacttcctgtgtttgcatcctctgttcctattctgcccttgctctgtgtcatctcagtcatttgacttagaaagtgcccttcaaaaggaccctgttcactgctgcacttttcaatgaattaaaatttatttctgttcta

SEQ ID NO: 246 - DNA, 2344 bp, Homo sapiens
agccggaagggccggcggacgctcgctaggtcggctcgctggccggggctccgcggctcccgtggttgccatggcggcggttgtcgcggcgacgaggtggtggcagctgttgctggtgctcagcgccgcggggatgggggcctcgggcgccccgcagccccccaacatcctgctcctgctcatggacgacatgggatggggtgacctcggggtgtatggagagccctccagagagaccccgaatttggaccggatggctgcagaagggctgcttttcccaaacttctattctgccaaccctctgtgctcgccatcgagggcggcactgctcacaggacggctacccatccgcaatggcttctacaccaccaacgcccatgccagaaacgcctacacaccgcaggagattgtgggcggcatcccagactcggagcagctcctgccggagcttctgaagaaggccggctacgtcagcaagattgtcggcaagtggcatctgggtcacaggccccagttccaccccctgaagcacggatttgatgagtggtttggatcccccaactgccactttggaccttatgacaacaaggccaggcccaacatccctgtgtacagggactgggagatggttggcagatattatgaagaatttcctattaatctgaagacgggggaagccaacctcacccagatctacctgcaggaagccctggacttcattaagagacaggcacggcaccacccctttttcctctactgggctgtcgacgccacgcacgcacccgtctatgcctccaaacccttcttgggcaccagtcagcgagggcggtatggagacgccgtccgggagattgatgacagcattgggaagatactggagctcctccaagacctgcacgtcgcggacaacaccttcgtcttcttcacgtcggacaacggcgctgccctcatttccgcccccgaacaaggtggcagcaacggcccctttctgtgtgggaagcagaccacgtttgaaggagggatgagggagcctgccctcgcatggtggccagggcacgtcactgcaggccaggtgagccaccagctgggcagcatcatggacctcttcaccaccagcctggcccttgcgggcctgacgccgcccagcgacagggccattgatggcctcaacctcctccccaccctcctgcagggccggctgatggacaggcctatcttctattaccgtggcgacacgctgatggcggccaccctcgggcagcacaaggctcacttctggacctggaccaactcctgggagaacttcagacagggcattgatttctgccctgggcagaacgtttcaggggtcacaactcacaatctggaagaccacacgaagctgcccctgatcttccacctgggacgggacccaggggagaggttccccctcagctttgccagcgccgagtaccaggaggccctcagcaggatcacctcggtcgtccagcagcaccaggaggccttggtccccgcgcagccccagctcaacgtgtgcaactgggcggtcatgaactgggcacctccgggctgtgaaaagttagggaagtgtctgacacctccagaatccattcccaagaagtgcctctggtcccactagcacctgcgcagactcaggccaggcctagaatctccggttggccctgcaagtgcctggaggaaggatggctctggcctcggtcctcccccaaccctgcccaagccagacagacagcacctgcagacgcagggggactgcacaattccacctgcccaggacctgaccctggcgtgtgcttggccctcctcctcgcccacggcgcctcagatttcaggaccctcctcctcgcccacggcgcctcagacctcaggaccctgccgtctcacgcctttgtgaaccccaaatatctgagaccagtctcagtttattttgccaaggttaaggatgcacctgtgacagcctcaggaggtcctgacaacaggtgcctgaggtggctggggatacagtttgcctttatacatcttagggagacacaagatcagtatgtgtatggcgtacattggttcagtcagccttccactgaatacacgattgagtctggcccagtgaatccgcatttttatgtaaacagtaagggaacggggcaatcatataagcgtttgtctcaggggagccccagagggatgacttccagttccgtctgtcctttgtccacaaggaatttccctggacgctaattatgagggaggcgtgtagcttcttatcattgtaactatgttatttagaaataaaacgggaggcaggtttgcctaattcccagcttga

SEQ ID NO: 247 - DNA, 4852 bp, Homo sapiens
attctatcagcggtacaaggggctggtggcgccacaggcgctgggaccgcgggcggacaaggatgggtccgcgcggcgcggcgagcttgccccgaggccccggacctcggcggctgctcctccccgtcgtcctcccgctgctgctgctgctgttgttggcgccgccgggctcgggcgccggggccagccggccgccccacctggtcttcttgctggcagacgacctaggctggaacgacgtcggcttccacggctcccgcatccgcacgccgcacctggacgcgctggcggccggcggggtgctcctggacaactactacacgcagccgctgtgcacgccgtcgcggagccagctgctcactggccgctaccagatccgtacaggtttacagcaccaaataatctggccctgtcagcccagctgtgttcctctggatgaaaaactcctgccccagctcctaaaagaagcaggttatactacccatatggtcggaaaatggcacctgggaatgtaccggaaagaatgccttccaacccgccgaggatttgatacctactttggatatctcctgggtagtgaagattattattcccatgaacgctgtacattaattgacgctctgaatgtcacacgatgtgctcttgattttcgagatggcgaagaagttgcaacaggatataaaaatatgtattcaacaaacatattcaccaaaagggctatagccctcataactaaccatccaccagagaagcctctgtttctctaccttgctctccagtctgtgcatgagccccttcaggtccctgaggaatacttgaagccatatgactttatccaagacaagaacaggcatcactatgcaggaatggtgtcccttatggatgaagcagtaggaaatgtcactgcagctttaaaaagcagtgggctctggaacaacacggtgttcatcttttctacagataacggagggcagactttggcagggggtaataactggccccttcgaggaagaaaatggagcctgtgggaaggaggcgtccgaggggtgggctttgtggcaagccccttgctgaagcagaagggcgtgaagaaccgggagctcatccacatctctgactggctgccaacactcgtgaagctggccaggggacacaccaatggcacaaagcctctggatggcttcgacgtgtggaaaaccatcagtgaaggaagcccatcccccagaattgagctgctgcataatattgacccgaacttcgtggactcttcaccgtgtcccaggaacagcatggctccagcaaaggatgactcttctcttccagaatattcagcctttaacacatctgtccatgctgcaattagacatggaaattggaaactcctcacgggctacccaggctgtggttactggttccctccaccgtctcaatacaatgtttctgagataccctcatcagacccaccaaccaagaccctctggctctttgatattgatcgggaccctgaagaaagacatgacctgtccagagaatatcctcacatcgtcacaaagctcctgtcccgcctacagttctaccataaacactcagtccccgtgtacttccctgcacaggacccccgctgtgatcccaaggccactggggtgtggggcccttggatgtaggatttcagggaggctagaaaacctttcaattggaagttggacctcaggccttttctcacgactcttgtctcatttgttatcccaacctgggttcacttggcccttctcttgctcttaaaccacaccgaggtgtctaatttcaacccctaatgcatttaagaagctgataaaatctgcaacactcctgctgttggctggagcatgtgtctagaggtgggggtggctgggtttatccccctttcctaagccttgggacagctgggaacttaacttgaaataggaagttctcactgaatcctggaggctggaacagctggctcttttagactcacaagtcagacgttcgattcccctctgccaatagccagttttattggagtgaatcacatttcttacgcaaatgaagggagcagacagtgattaatggttctgttggccaaggcttctccctgtcggtgaaggatcatgttcaggcactccaagtgaaccacccctcttggttcaccccttactcacttatctcatcacagagcataaggcccattttgttgttcaggtcaacagcaaaatgcctgcaccatgactgtggcttttaaaataaagaaatgtgtttttatcgtaatttatttccccccagccattgctcactctgtctagacttcctgccacttccaattcttctgtggcttttcctgcctttccttttgacctcagtagtcctatccctgggaaggccactttgcttctctacctgagcacccctgatttctggaacgctgctgagccctgccttacttttgcccctagggctgaagctagaggcctccccgtaataggcggtggagttgctctgtgaggatgttcatggtagacactaagagggctgggtgggagatgcttggctctgtggcatctgttcagcgaggcttttcctatattgcatggagttagtcattgtgattgtagctttatttcataatatattaagacttgcactgctatttactagcagtgagaagaaacctcaggaaaggatatgaaaaagcaagtggccagtgtctgggatactgggccttggtaaagcagaggagggcacacccacagtcctcttattctctgttttactgcttgttttgaggttctggggtctggcaaagaggatgcagtttgacacctgcagccctttctcaatcccactaatgtcttactaatgtggaacagtccatattagctccagagagtgtcaaacccagagaaatgtgtgcaaaaatgatactcttttctgcattagccccaccattgtgttcaccaatgcttggaacactgcctgaaggcactcattttttaatttttattttatttttaattttttatatctttatgagacgatctcactctgtcaccaggttggagtacagtggtacaatcacaactcaccgtagcctcaaactcctgggctcaagtgattctcccacctcaggcacccaaatagctggaactacaggcatataccgccacacccagctaattttattttttgaaaagacaaggttccctatgttgcccagctggtcttaaactcctgggctccagcaattatcccagcttgggctccaaaagtgctgggattacaggcatgagtcaccatgcctggcctcattttttaaaacaaatgaataaatggacaaatgagtaaatgagaaagtctcacaccatgaaagatgctagtccaatgagctgaatacagaggtaatataaatgtcttccagctgttgcttttctgttctcaagctgcccctcctggggtaggagcataatctacatcactgggcagtcacaggacactctatagcaaggttgtagcgtcctctccagtggggggagaaaaggaactgtgcctaccaaaggtactctcttgtcagcaatttccatttctatactttatgggacactagaaactaaaagcaacaaataatctgatataagtccttgtatagtcatccttcaattcagtagcaatattttctggtcactactaacctgtattgtattaaaatgagactattggaaggaaatggtgctaaaactaataacatctcttaccaacctttacccaactcctgggttggcaaacagctgaccaaactgccatcacctcccacttggaagtgtatggccgacagcatgaaatagctgagcccagatgttccttctgcatcctccgaatcccagggctgggtgtaggtagccgttggaggccatcgctacagggcacctatctgttatcgctgctgtcctcccaacagctgtctccagttctagttccttggttttcaggcacagtgggggatgttctgcacccagtggacttcaaaagagttttgaagacttaattttttgtaaaacaagtacttgagattttggtttatccataatagaatgtatttcattagattctctgattctatataagaatgtgaaaagattgatatattgttgttagaaataatgttatttctttccaattttttttttttttttttttgagatggagtctcgctctgtcacccaggctggagtgcagtggtgtgatctcggctcactgcagcctctaactcccaggttcaagctattctcctgcctcagcctcccaagtagctggattacaggcatacaccaccacgcctggctatgttttgtatttttcgtagagatagggtttcaccatgttggccaggctggtctcaaactcctgacctcaagtgatccacccacttcagcttcccaaagcactgggattacaggtgtgagccactgtgcccggcaaatttttttacctttacagaaggttttgcttatttaattgtgagctcatttttctttgttacttttgtccccccagatttgggggacaaaataaaattaatcttttaaaatgtgtcagccatatgtatggggcttccatttggggtgaggagaaagttctggaactagatagtggtcatggttatacaacatcataaatgcaattactgccactgaattgtatgttttaaagtggttaaaatgttaagttttatgttttattacaatttttaaatgtgtcaaccaactttatagtacataaattatatctcagtaaagctgttaaataaataaatatagtaaaaattttagaactaaaaaaa

SEQ ID NO: 248 - DNA, 2199 bp, Homo sapiens
agacggtggccgagcgggggaccgggaagcatggcccgggggtcggcggttgcctgggcggcgctcgggccgttgttgtggggctgcgcgctggggctgcagggcgggatgctgtacccccaggagagcccgtcgcgggagtgcaaggagctggacggcctctggagcttccgcgccgacttctctgacaaccgacgccggggcttcgaggagcagtggtaccggcggccgctgtgggagtcaggccccaccgtggacatgccagttccctccagcttcaatgacatcagccaggactggcgtctgcggcattttgtcggctgggtgtggtacgaacgggaggtgatcctgccggagcgatggacccaggacctgcgcacaagagtggtgctgaggattggcagtgcccattcctatgccatcgtgtgggtgaatggggtcgacacgctagagcatgaggggggctacctccccttcgaggccgacatcagcaacctggtccaggtggggcccctgccctcccggctccgaatcactatcgccatcaacaacacactcacccccaccaccctgccaccagggaccatccaatacctgactgacacctccaagtatcccaagggttactttgtccagaacacatattttgactttttcaactacgctggactgcagcggtctgtacttctgtacacgacacccaccacctacatcgatgacatcaccgtcaccaccagcgtggagcaagacagtgggctggtgaattaccagatctctgtcaagggcagtaacctgttcaagttggaagtgcgtcttttggatgcagaaaacaaagtcgtggcgaatgggactgggacccagggccaacttaaggtgccaggtgtcagcctctggtggccgtacctgatgcacgaacgccctgcctatctgtattcattggaggtgcagctgactgcacagacgtcactggggcctgtgtctgacttctacacactccctgtggggatccgcactgtggctgtcaccaagagccagttcctcatcaatgggaaacctttctatttccacggtgtcaacaagcatgaggatgcggacatccgagggaagggcttcgactggccgctgctggtgaaggacttcaacctgcttcgctggcttggtgccaacgctttccgtaccagccactacccctatgcagaggaagtgatgcagatgtgtgaccgctatgggattgtggtcatcgatgagtgtcccggcgtgggcctggcgctgccgcagttcttcaacaacgtttctctgcatcaccacatgcaggtgatggaagaagtggtgcgtagggacaagaaccaccccgcggtcgtgatgtggtctgtggccaacgagcctgcgtcccacctagaatctgctggctactacttgaagatggtgatcgctcacaccaaatccttggacccctcccggcctgtgacctttgtgagcaactctaactatgcagcagacaagggggctccgtatgtggatgtgatctgtttgaacagctactactcttggtatcacgactacgggcacctggagttgattcagctgcagctggccacccagtttgagaactggtataagaagtatcagaagcccattattcagagcgagtatggagcagaaacgattgcagggtttcaccaggatccacctctgatgttcactgaagagtaccagaaaagtctgctagagcagtaccatctgggtctggatcaaaaacgcagaaaatacgtggttggagagctcatttggaattttgccgatttcatgactgaacagtcaccgacgagagtgctggggaataaaaaggggatcttcactcggcagagacaaccaaaaagtgcagcgttccttttgcgagagagatactggaagattgccaatgaaaccaggtatccccactcagtagccaagtcacaatgtttggaaaacagcctgtttacttgagcaagactgataccacctgcgtgtcccttcctccccgagtcagggcgacttccacagcagcagaacaagtgcctcctggactgttcacggcagaccagaacgtttctggcctgggttttgtggtcatctattctagcagggaacactaaaggtggaaataaaagattttctattatggaaataaagagttggcatgaaagtggctactgaaaa

SEQ ID NO: 249 - DNA, 3185 bp, Homo sapiens
ctttccagggccggggaaccccaggaggaagctgctgagccatgggcgcctacgcgcgggcttcgggggtctgcgctcgcggctgcctggactcagcaggcccctggaccatgtcccgcgccctgcggccaccgctcccgcctctctgctttttccttttgttgctggcggctgccggtgctcgggccgggggatacgagacatgccccacagtgcagccgaacatgctgaacgtgcacctgctgcctcacacacatgatgacgtgggctggctcaaaaccgtggaccagtacttttatggaatcaagaatgacatccagcacgccggtgtgcagtacatcctggactcggtcatctctgccttgctggcagatcccacccgtcgcttcatttacgtggagattgccttcttctcccgttggtggcaccagcagacaaatgccacacaggaagtcgtgcgagaccttgtgcgccaggggcgcctggagttcgccaatggtggctgggtgatgaacgatgaggcagccacccactacggtgccatcgtggaccagatgacacttgggctgcgctttctggaggacacatttggcaatgatgggcgaccccgtgtggcctggcacattgaccccttcggccactctcgggagcaggcctcgctgtttgcgcagatgggcttcgacggcttcttctttgggcgccttgattatcaagataagtgggtacggatgcagaagctggagatggagcaggtgtggcgggccagcaccagcctgaagcccccgaccgcggacctcttcactggtgtgcttcccaatggttacaacccgccaaggaatctgtgctgggatgtgctgtgtgtcgatcagccgctggtggaggaccctcgcagccccgagtacaacgccaaggagctggtcgattacttcctaaatgtggccactgcccagggccggtattaccgcaccaaccacactgtgatgaccatgggctcggacttccaatatgagaatgccaacatgtggttcaagaaccttgacaagctcatccggctggtaaatgcgcagcaggcaaaaggaagcagtgtccatgttctctactccacccccgcttgttacctctgggagctgaacaaggccaacctcacctggtcagtgaaacatgacgacttcttcccttacgcggatggcccccaccagttctggaccggttacttttccagtcggccggccctcaaacgctacgagcgcctcagctacaacttcctgcaggtgtgcaaccagctggaggcgctggtgggcctggcggccaacgtgggaccctatggctccggagacagtgcacccctcaatgaggcgatggctgtgctccagcatcacgacgccgtcagcggcacctcccgccagcacgtggccaacgactacgcgcgccagcttgcggcaggctgggggccttgcgaggttcttctgagcaacgcgctggcgcggctcagaggcttcaaagatcacttcaccttttgccaacagctaaacatcagcatctgcccgctcagccagacggcggcgcgcttccaggtcatcgtttataatcccctggggcggaaggtgaattggatggtacggctgccggtcagcgaaggcgttttcgttgtgaaggaccccaatggcaggacagtgcccagcgatgtggtaatatttcccagctcagacagccaggcgcaccctccggagctgctgttctcagcctcactgcccgccctgggcttcagcacctattcagtagcccaggtgcctcgctggaagccccaggcccgcgcaccacagcccatccccagaagatcctggtcccctgctttaaccatcgaaaatgagcacatccgggcaacgtttgatcctgacacagggctgttgatggagattatgaacatgaatcagcaactcctgctgcctgttcgccagaccttcttctggtacaacgccagtataggtgacaacgaaagtgaccaggcctcaggtgcctacatcttcagacccaaccaacagaaaccgctgcctgtgagccgctgggctcagatccacctggtgaagacacccttggtgcaggaggtgcaccagaacttctcagcttggtgttcccaggtggttcgcctgtacccaggacagcggcacctggagctagagtggtcggtggggccgatacctgtgggcgacacctgggggaaggaggtcatcagccgttttgacacaccgctggagacaaagggacgcttctacacagacagcaatggccgggagatcctggagaggaggcgggattatcgacccacctggaaactgaaccagacggagcccgtggcaggaaactactatccagtcaacacccggatttacatcacggatggaaacatgcagctgactgtgctgactgaccgctcccaggggggcagcagcctgagagatggctcgctggagctcatggtgcaccgaaggctgctgaaggacgatggacgcggagtatcggagccactaatggagaacgggtcgggggcgtgggtgcgagggcgccacctggtgctgctggacacagcccaggctgcagccgccggacaccggctcctggcggagcaggaggtcctggcccctcaggtggtgctggccccgggtggcggcgccgcctacaatctcggggctcctccgcgcacgcagttctcagggctgcgcagggacctgccgccctcggtgcacctgctcacgctggccagctggggccccgaaatggtgctgctgcgcttggagcaccagtttgccgtaggagaggattccggacgtaacctgagcgcccccgttaccttgaacttgagggacctgttctccaccttcaccatcacccgcctgcaggagaccacgctggtggccaaccagctccgcgaggcagcctccaggctcaagtggacaacaaacacaggccccacaccccaccaaactccgtaccagctggacccggccaacatcacgctggaacccatggaaatccgcactttcctggcctcagttcaatggaaggaggtggatggttaggtctgctgggatgggccctccaagcccaagcctcctgctccgggggcagaccagactctgactctcctcttggggctgctgccattaaaacgctactactaagactca

SEQ ID NO: 250 - DNA, 4001 bp, Homo sapiens
gagtggcttcaccgccggtcccttgcagcgctgcctttcgatctctccacatctcggtggcgcgggatctcaagatgcgcctccacctgctcctgctgctcgcgctgtgcggtgcaggcaccaccgccgcggagctcagttacagcttgcgtggcaactggagcatctgcaatgggaacggctcgctggagctgcccggggcggtccctggctgcgtgcacagcgccttgttccagcagggcctgatccaggattcttactacagatttaatgaccttaactacagatgggtctctttggataactggacctatagcaaagaatttaaaatcccctttgaaattagcaaatggcaaaaagtaaatttgattcttgagggagtggatacggtttcaaaaatcctgttcaatgaagtcactattggggaaacagacaatatgttcaatagatatagctttgatattaccaacgtggtcagggacgtgaactccattgagctgcgtttccagtcagcggtgttgtatgcagcacagcagagcaaagctcacactcgctaccaggttcccccagactgccctccacttgtgcagaagggtgaatgccatgtcaactttgttcggaaggagcaatgttcctttagttgggactgggggccttcctttcctacccagggaatctggaaagatgttagaattgaagcctataatatttgtcacctgaactacttcacattttccccaatatatgataagagtgcccaggagtggaatctggaaatagagtctacatttgatgttgtcagctcaaagccagttggtggtcaagtgatcgtagccatccctaagttgcaaacacaacagacatacagcattgaacttcaacctgggaaaaggattgttgagctatttgtgaacattagcaagaatattactgtagaaacttggtggcctcatggacatggaaaccagactgggtacaacatgactgttctttttgaactggatggaggcttaaatattgaaaaatcagctaaggtttattttaggacagtggaacttatagaagagcctataaaagggtctcctggtttgagtttctatttcaaaattaatggatttcccatatttctaaaaggctcaaactggatcccagcagattcattccaggaccgagtaacctctgagttgttacggctccttttacagtctgttgtggatgctaatatgaatactcttcgggtttggggaggaggaatttatgagcaggatgaattctatgaactctgtgatgaactaggaataatggtatggcaggattttatgtttgcctgtgccctttatccaactgatcagggcttcctggattcagtgacagcagaagttgcctaccagatcaagagactgaaatctcatccttctatcatcatatggagtggcaataatgaaaatgaggaggcgctgatgatgaattggtatcatatcagtttcactgaccggccaatctacatcaaggactatgtgacactctatgtgaaaaacatcagagagctcgtactggcaggagacaagagtcgtccttttattacgtccagtcctacaaatggggctgaaactgttgcagaagcctgggtctctcaaaaccctaatagcaattattttggtgatgtacatttttatgactatatcagtgattgctggaactggaaagttttcccaaaagctcgatttgcatctgaatatggatatcagtcctggccgtccttcagtacattagaaaaggtctcgtctacagaggactggtctttcaatagcaagttttcacttcatcgacaacatcacgaaggtggtaacaaacaaatgctttatcaggctggacttcatttcaaactcccccaaagcacagatccattacgcacatttaaagataccatctaccttactcaggtgatgcaggcccagtgtgtcaaaacagaaactgaattctaccgccgtagtcgcagcgagatagtggatcagcaagggcacacgatgggggcactttattggcagttgaatgacatctggcaagctccttcctgggcttctcttgagtacggaggaaagtggaaaatgcttcattactttgctcagaatttctttgctccactgttgccagtaggctttgagaatgaaaacacgttctatatctatggtgtgtcagatcttcactcggattattcgatgacactcagtgtgagagtccatacatggagctccctggagcccgtgtgctctcgtgtgactgaacgttttgtgatgaaaggaggagaggctgtctgcctttatgaggagccagtgtctgaattgctgaggagatgtgggaattgcacacgggaaagctgtgtggtttccttttacctttcagctgaccatgaactcctgagcccgaccaactaccacttcttgtcctcaccgaaggaggccgtggggctctgcaaggcgcagatcactgccatcatctctcagcaaggtgacatatttgtttttgacctggagacctcagctgtcgctccctttgtttggttggatgtaggaagcatcccagggagatttagtgacaatggtttcctcatgactgagaagacacgaactatattattttacccttgggagcccaccagcaagaatgagttggagcaatcttttcatgtgacctccttaacagatatttactgaaggaatctaggttgtattttcagtggacaatgggaataaagcatttctaaagcaccgactggagaggaaggcaacagagacaaggagagaagccgagagacatgtctgcgtgctgccacgcatttgagcgattgctctgtgaagagttgtacactgaacactttcaggggaggctgtttacccaggcaatgtcctcaaacaagcctgtgccggggtgtcctggaatctgtgccaggactgtgtttttagcccttcacctctcagctttagcaggacatgaaccagttataacaagatggccctgcagctggttacaagaatgtgacatggcaggatctatggaaccaaatggaaggttttgaggtgatgtaggtctttcacagctagctttggggaatacggaatactcaaataaagtgctttgttattatttcagagggaatggcgattgaaatgttacaacagagatttcttggtggtagctatttgggtaaaggtatatgggtatttttctgtacatgtgaaattatataaaaataaaagttatataaattacattgacaacttgatatttcatctgtggcttatttaaccgttctataaatattcaattttgcccaatactgtgctggaccctaatttccatttagttctcgttattattctgcttggtaaactgggagagtttgaagaatctaaactaagacatgtgaaaggttttctctggaaacagtcatgtaattggttatagaatggaccagcaaagagtgtttggctttaaaattaagatattattagtggttttggttttaaaaatgagaagcattatgttcagtgactctaaaagtaactacagacaatccagtcttcttcagtatctaagagtatcctcattttatatgtacacacacacacacacacacacacacacacacacacacacacacacaaagccttatcaaggggataaggggacttagggctgggactccgtagagtcttacttggtaaatattatgtcatgttcttatgactattgtaaatcctgttttagcaaagcattgctgcgaggcagggaggactgctcttcttgacacctgtgcatgttctgccaggggccctgagaaggggctttcaagctgatgagccagagtttactttgtagtttgcccttactagttctgtaaccttaatcaagttacttaacttcctgtgctcagttttcttgtggctaaatgggagtggtaacacccaccttgtaagtttgttttgaagaataaataaaat

SEQ ID NO: 251 - DNA, 2133 bp, Homo sapiens
cgggccaatcgttagtcagagtgggcggagccgcccgcgggcacctgcgcgttaagagtgggccgcgtcgctgaggggtagcgatgcgggctccggggatgaggtcgcggccggcgggtcccgcgctgttgctgctgctgctcttcctcggagcggccgagtcggtgcgtcgggcccagcctccgcgccgctacaccccagactggccgagcctggattctcggccgctgccggcctggttcgacgaagccaagttcggggtgttcatccactggggcgtgttctcggtgcccgcctggggcagcgagtggttctggtggcactggcagggcgaggggcggccgcagtaccagcgcttcatgcgcgacaactacccgcccggcttcagctacgccgacttcggaccgcagttcactgcgcgcttcttccacccggaggagtgggccgacctcttccaggccgcgggcgccaagtatgtagttttgacgacaaagcatcacgaaggcttcacaaactggccgagtcctgtgtcttggaactggaactccaaagacgtggggcctcatcgggatttggttggtgaattgggaacagctctccggaagaggaacatccgctatggactataccactcactcttagagtggttccatccactctatctacttgataagaaaaatggcttcaaaacacagcattttgtcagtgcaaaaacaatgccagagctgtacgaccttgttaacagctataaacctgatctgatctggtctgatggggagtgggaatgtcctgatacttactggaactccacaaattttctttcatggctctacaatgacagccctgtcaaggatgaggtggtagtaaatgaccgatggggtcagaactgttcctgtcaccatggaggatactataactgtgaagataaattcaagccacagagcttgccagatcacaagtgggagatgtgcaccagcattgacaagttttcctggggctatcgtcgtgacatggcattgtctgatgttacagaagaatctgaaatcatttcggaactggttcagacagtaagtttgggaggcaactatcttctgaacattggaccaactaaagatggactgattgttcccatcttccaagaaaggcttcttgctgttgggaaatggctgagcatcaatggggaggctatctatgcctccaaaccatggcgggtgcaatgggaaaagaacacaacatctgtatggtatacctcaaagggatcggctgtttatgccatttttctgcactggccagaaaatggagtcttaaaccttgaatcccccataactacctcaactacaaagataacaatgctgggaattcaaggagatctgaagtggtccacagatccagataaaggtctcttcatctctctaccccagttgccaccctctgctgtccccgcagagtttgcttggactataaagctgacaggagtgaagtaatcatttgagtgcaagaagaaagaggcgctgctcactgttttcctgcttcagtttttctcttatagtaccatcactataatcaacgaacttctcttctccacccagagatggcttttccaacacattttaattaaaggaactgagtacattaccctgatgtctaaatggaccaaagatctgagatccattgtgattatatctgtatcaggtcagcagaagaaggaactgagcagttgaactctgagttcatcaattgtaatatttggaaattatctacaatggaatcttccctctgttctctgataacctacttgcttactcaatgcctttaagccaagtcaccctgttgcctatgggaggaggtggaaggatttggcaagctcaaccacatgctatttagttagcatcagttgtcaccaacagtctttctgcaaagggcaggagagctttgggggaaaggaaaaggcttaccaggctgctatggtcaactcttcagaaattttcagagcaatctaaaagcgccaaaattcgctatgtttacagtgatactattaagaaaatgaatgtgattctgctctgtctttttaagtatgatcaaataaaaaatttgtacatcacaatcatttctaccaaaaaaaaaaaaaaaaaa

SEQ ID NO: 252 - DNA, 2037 bp, Homo sapiens
aattgttcggcgatcgctggctgccgggacttttctcgcgctggtctcttcggtggtcagggatggcgcggaagtcgaacttgcctgtgcttctcgtgccgtttctgctctgccaggccctagtgcgctgctccagccctctgcccctggtcgtcaacacttggccctttaagaatgcaaccgaagcagcgtggagggcattagcatctggaggctctgccctggatgcagtggagagcggctgtgccatgtgtgagagagagcagtgtgacggctctgtaggctttggaggaagtcctgatgaacttggagaaaccacactagatgccatgatcatggatggcactactatggatgtaggagcagtaggagatctcagacgaattaaaaatgctattggtgtggcacggaaagtactggaacatacaacacacacacttttagtaggagagtcagccaccacatttgctcaaagtatggggtttatcaatgaagacttatctaccactgcttctcaagctcttcattcagattggcttgctcggaattgccagccaaattattggaggaatgttataccagatccctcaaaatactgcggaccctacaaaccacctggtatcttaaagcaggatattcctatccataaagaaacagaagatgatcgtggtcatgacactattggcatggttgtaatccataagacaggacatattgctgctggtacatctacaaatggtataaaattcaaaatacatggccgtgtaggagactcaccaatacctggagctggagcctatgctgacgatactgcaggggcagccgcagccactgggaatggtgatatattgatgcgcttcctgccaagctaccaagctgtagaatacatgagaagaggagaagatccaaccatagcttgccaaaaagtgatttcaagaatccagaagcattttccagaattctttggggctgttatatgtgccaatgtgactggaagttacggtgctgcttgcaataaactttcaacatttactcagtttagtttcatggtttataattccgaaaaaaatcagccaactgaggaaaaagtggactgcatctaatccatctttactgtcaacatctgtatttaaagaagaaagaaacaaaggctgaaaaggctgctcactctcatcatctagtgttcctcatgtgttctaaagtctttttgtaaaataaacacaaaaataaatttatgttgaattggcactttctatatctgaaattgtattatctatttttatttaacctttcttatattatctgaagatgaatatgtatgtggctgtattttgtatatatttaagttttaagtgacacttggatttctgatcagtgttgcaaaaaattgctactttgagatttatttccacagtgatatattaaacccaaaaggaatcatcatatttggatgcttaaaatagagtatacaagttttttagacccaaagaaaaaaacagcagagtctcagcatgatcagtcctgattgaatttcattatgtcacagtgatgcatgtcttagcactgattattggttttacttaatattccctaaaaacttgaggaaggaagatgatagaacatgagatactctttgttttgtacatactagaaaatacagctatcttctgatgagcaattgtgttgattttctttgcttttttcctcttatggagctctcagtgtgtgaaagttctaaagccacaagaatcaatgatgttttagctgctaatatttagtattgatcgtttcttttaaaaatgatttggggaacttgatctgtactgtaattttactaattccttgtgcagaggtgggtatggcaattagaagtcaagaaatgggttgtttagcttggtttgtttccctaacttctgattaactctctgtatgacaactctacagaagttgtgcgcgtgctttctcagcagcatttttccttcaaaatcatctttttaatcaacagtcattaataaatgtacatgtacgatattcaaa

SEQ ID NO: 253 - DNA, 3353 bp, Homo sapiens
ctctgtggagtctagctgccagggtcgcggcagctgcggggagagatgactggggagcgacccagcacggcgctcccggacagacgctgggggccgcggattctgggcttctggggaggctgtagggtttgggtgtttgccgcgatcttcctgctgctgtctctggcagcctcctggtccaaggctgagaacgacttcggtctggtgcagccgctggtgaccatggagcaactgctgtgggtgagcgggagacagatcggctcagtggacaccttccgcatcccgctcatcacagccactccgcggggcactcttctcgcctttgctgaggcgaggaaaatgtcctcatccgatgagggggccaagttcatcgccctgcggaggtccatggaccagggcagcacatggtctcctacagcgttcattgtcaatgatggggatgtccccgatgggctgaaccttggggcagtagtgagcgatgttgagacaggagtagtatttcttttctactccctttgtgctcacaaggccggctgccaggtggcctctaccatgttggtatggagcaaggatgatggtgtttcctggagcacaccccggaatctctccctggatattggcactgaagtgtttgcccctggaccgggctctggtattcagaaacagcgggagccacggaagggccgcctcatcgtgtgtggccatgggacgctggagcgggacggagtcttctgtctcctcagcgatgatcatggtgcctcctggcgctacggaagtggggtcagcggcatcccctacggtcagcccaagcaggaaaatgatttcaatcctgatgaatgccagccctatgagctcccagatggctcagtcgtcatcaatgcccgaaaccagaacaactaccactgccactgccgaattgtcctccgcagctatgatgcctgtgatacactaaggccccgtgatgtgaccttcgaccctgagctcgtggaccctgtggtagctgcaggagctgtagtcaccagctccggcattgtcttcttctccaacccagcacatccagagttccgagtgaacctgaccctgcgatggagcttcagcaatggtacctcatggcggaaagagacagtccagctatggccaggccccagtggctattcatccctggcaaccctggagggcagcatggatggagaggagcaggccccccagctctacgtcctgtatgagaaaggccggaaccactacacagagagcatctccgtggccaaaatcagtgtctatgggacactctgagctgtgccactgccacaggggtattctgccttcaggactctgccttcaggaacacgggtctgtagagggtctgctggagacgcctgaaagacagttccatcttcctttagactccagccttggcaaaatcaccttccctttaccagggaaatcacttcctttaggactgaaagctaggcgtcctctcccacaaaaaagtcctgccctcatctgagaatactgtctttccatatggctaagtgtggccccaccaccctctctgccctcccgggacattgattggtcctgtcttgggcaggtctagtgagctgtagaattgaatcaatgtgaactcagggaactggggaaggctgagcctcctctttggtgttgcggtaagataaccgacagggctggtgaaagtccccagatggcaggatatttggtttcagagtaaggactaggtgcaccaccatgactgactatcaatcaaaatgtttgtaacttaaaatttttaatgaaggataatgaatatttgtagagtctctatggttctgtcaatgcacatcttcgtgtctgttttcctcatgtatccttgtgagcctgggtgagttctggggagagacctgatgtgcgtactgcctgtgaaaatctgactttggcaaatcaaatcctcttttccttttgacatgccctctttttttgttgttgctttttttgagacagggctcgctctgtcacccaggctggagtgcagttgcacaatcacggctcactgaagcctcaacctcctgggctcaagtgatcctcacgtctcagcctccggagtagttgggactacaggtcagtgacaccatgcctggttaatttttttaatttttattttcagtagagacaaggttgcgctatgttgcccaggctggtatggaactcctgtgcttaagcaatcctcatgcctcagcttcccaaagtgctgaggttacagctatgagccaccgcacccagcctacattccttcttatcaccgagaaacaggttgatcttcacaggtgtaatgagtatgaagggagtgccataagatattttttattttttatttatttattttttaatttaatttttttttttttgagatggagtcttgctctggcacccaggctagagtgcagtggtgcgatctcggctcactgcaacctctgcctcccaggttcaagcgattcttctgcctcagcttcccgaatagctgggattacaggtgcccaccaccacacccggctaatttttgtatttttagtagagacggagtttcaccatgttggccaggctggtctcaaactcctggcctcaggtgatccacccgcctcggcctcccaaagtgttgtgattacaagcatgagccatggtgccggcgggctgatttttttaatttttagtagagacaaagtctcactatattgcctaggttggtctcaaactgctgagctcaagcaatctgccggccatgttctctcaaagtgctgggattacaggcttgagcccctgcacccagcctgtaagatattttaaaatccacacttggccaagcgtggtggctcacacatataatcccagcactttgggaggccaaggtgggcggatcacaaggtcaggagttcgagaccagcctggccaatatggtgaaatcccatctctactaaaaatacaaaaactagccaggcgtgttggcttacacttatagtcccagctactcaggtggctgaggcaggagaatcacttgaaccaggaggcggagtttgcagtgagctgagatcacagcactgcacaccagcctcggcaacagagtgagactccgtctgaaaaaaaaaaaatccacgctgttttatatttctaacatggggtaggataccatcctccatgaaatagggtgcaagtgtgtgaaatgcagatgggaatcctgtcccagctagcctgacagagaagtgagcacttcctatggcaaattatgtaagaaaatattccccaggcagatgcttatgaaaagaatctgttcagcctgcaggtaagtgggagagcccttgctc

SEQ ID NO: 254 - DNA, 1858 bp, Homo sapiens
agtccccgggcgcctcctggagagcaaggacgcgggggagcagagatgatccgagccgcgccgccgccgctgttcctgctgctgctgctgctgctgctgctagtgtcctgggcgtcccgaggcgaggcagcccccgaccaggacgagatccagcgcctccccgggctggccaagcagccgtctttccgccagtactccggctacctcaaaggctccggctccaagcacctccactactggtttgtggagtcccagaaggatcccgagaacagccctgtggtgctttggctcaatgggggtcccggctgcagctcactagatgggctcctcacagagcatggccccttcctggtccagccagatggtgtcaccctggagtacaacccctattcttggaatctgattgccaatgtgttatacctggagtccccagctggggtgggcttctcctactccgatgacaagttttatgcaactaatgacactgaggtcgcccagagcaattttgaggcccttcaagatttcttccgcctctttccggagtacaagaacaacaaacttttcctgaccggggagagctatgctggcatctacatccccaccctggccgtgctggtcatgcaggatcccagcatgaaccttcaggggctggctgtgggcaatggactctcctcctatgagcagaatgacaactccctggtctactttgcctactaccatggccttctggggaacaggctttggtcttctctccagacccactgctgctctcaaaacaagtgtaacttctatgacaacaaagacctggaatgcgtgaccaatcttcaggaagtggcccgcatcgtgggcaactctggcctcaacatctacaatctctatgccccgtgtgctggaggggtgcccagccattttaggtatgagaaggacactgttgtggtccaggatttgggcaacatcttcactcgcctgccactcaagcggatgtggcatcaggcactgctgcgctcaggggataaagtgcgcatggaccccccctgcaccaacacaacagctgcttccacctacctcaacaacccgtacgtgcggaaggccctcaacatcccggagcagctgccacaatgggacatgtgcaactttctggtaaacttacagtaccgccgtctctaccgaagcatgaactcccagtatctgaagctgcttagctcacagaaataccagatcctattatataatggagatgtagacatggcctgcaatttcatgggggatgagtggtttgtggattccctcaaccagaagatggaggtgcagcgccggccctggttagtgaagtacggggacagcggggagcagattgccggcttcgtgaaggagttctcccacatcgcctttctcacgatcaagggcgccggccacatggttcccaccgacaagcccctcgctgccttcaccatgttctcccgcttcctgaacaagcagccatactgatgaccacagcaaccagctccacggcctgatgcagcccctcccagcctctcccgctaggagagtcctcttctaagcaaagtgcccctgcaggccgggttctgccgccaggactgcccccttcccagagccctgtacatcccagactgggcccagggtctcccatagacagcctgggggcaagttagcactttattcccgcagcagttcctgaatggggtggcctggccccttctctgcttaaagaatgccctttatgatgcactgattccatcccaggaacccaacagagctcaggacagcccacagggaggtggtggacggactgtaattgatagattgattatggaattaaattgggtacagcttcaaa

SEQ ID NO: 255 - DNA, 3696 bp, Homo sapiens
atcaggttaccggattcgagtcagaagcggcggcaggtctgaacgcttcggtaggataagtgcggtgggagggggctctgcggttttggggagcccagggcgggaacccggacccggctggaagtccggagcctggccgcagccccgcccctccgctctttcttggtgaccttaagccagtggctgcctttttctgagcccgggcggggccgaaggcggcccgtaggccctcgggactcccagcactgcagagggtgtgaggtctgacatccaagacacgttgtttcgtatttctgaaggaagaactgaagctccgggaagtgatggctggggatggggcgggcaacttggggaccgagtgtacgatccacgcctaaggttgagggcggccgagctagccaggcagccgtgaccccagtgcttttcagacgtttcttagcttccagagcccaacacatacagctgatacacgcagaccagatctggtcaggtcctcggaagctgagtccagagcgatgctgctgaagacagtgctcttgctgggacatgtggcccaggtgctgatgctggacaatgggctcctgcagacaccacccatgggctggctggcctgggaacgcttccgctgcaacattaactgtgatgaggacccaaagaactgcataagtgaacagctcttcatggagatggctgaccggatggcacaggatggatggcgggacatgggctacacatacctcaacattgatgactgctggatcggtggtcgcgatgccagtggccgcctgatgccggatcccaagcgcttccctcatggcattcctttcctggctgactacgttcactccctgggcctgaagttgggtatctacgcggacatgggcaacttcacctgcatgggttacccaggcaccacactggacaaggtggtccaggatgctcagaccttcgccgagtggaaggtagacatgctcaagctggatggctgcttctccacccccgaggagcgggcccaggggtaccccaagatggctgctgccctgaatgccacaggccgccccatcgccttctcctgcagctggccagcctatgaaggcggcctccccccaagggtgaactacagtctgctggcggacatctgcaacctctggcgtaactatgatgacatccaggactcctggtggagcgtgctctccatcctgaattggttcgtggagcaccaggacatactgcagccagtggccggccctgggcactggaatgaccctgacatgctgctcattgggaactttggtctcagcttagagcaatcccgggcccagatggccctgtggacggtgctggcagcccccctcttgatgtccacagacctgcgtaccatctccgcccagaacatggacattctgcagaatccactcatgatcaaaatcaaccaggatcccttaggcatccagggacgcaggattcacaaggaaaaatctctcatcgaagtgtacatgcggcctctgtccaacaaggctagcgccttagtcttcttcagctgcaggaccgatatgccttatcgctaccactcctcccttggccagctgaacttcaccgggtctgtgatatatgaggcccaggacgtctactcaggtgacatcatcagtggcctccgagatgaaaccaacttcacagtgatcatcaacccttcaggggtagtgatgtggtacctgtatcccatcaagaacctggagatgtcccagcagtgaggagctgggacatgtgacaggctgtggtggcaccactgagcctagaccatggagccttggcatgcccagggcaagtggggaggttctctgctccccaggcctgctcggtgactgaccccatcatacccaaagtgcaatctcacggccaggttctatgccctgtccaagcgtaaaccctcttggaaacttcttttggggcaattttcctgtggccttcctggcctctacttccatgtgcgcagccccacagacgttgctgagcaactcgccagcctcctgagctccatgcccatcaggactctagcctctgaccttgctgttgactctgaaatcaggatttggaagttttcgaattaggagtagagagatctgacctcttgccaggaatgcccatggatcatgtgattggcttttctacccatagagggccttgcagcctgataccacctgggagtgagggtcacaaaggagaccttggctccctcaggtcaccaataaacctgttctttaatcaagtagttgtaatatggacctggggtacctttagttagggactctggtggcactacacggggtgctggattcaaatctcacctctatggatgatgtctggcatcgtctggcccctccttttccaaagtgaccagaagattgtacttcctagagatgccagacttgcctcacacccaggagctgcccctgctgtgcctggtatgctggcagtggtgatggtgacaacacaatgaggccaagtagcaatgctcccaggtcctgcagcttgtgctctgcccagcagtgcccctggcccagcacctcagcctgctcttctctctggtggctccaccccaacccctacttcttttcctttatttctctcccaacctggctgcaaaggaggttcatattccccagatgtgtccacaaacctgtccaggagttgtgtcttaaaattgatttcctgtccctcttcctaaggacaggggtaacagtcaaagtgaaggaatgatgggttcttgcctgtcttgctttggtccgtatttcccaagccctcctcttttagccaaggctacagggcacttgtcttccctggtggctctcccctttggagagagctagtggcagagcaacctagctaggtcctccttgggctttgaatgcaggagcacccagtgccccaggccttgcactgtgctgcccaaggagtattttctgggtggatctcccatactcctcagggttctgaggtccttgtatttagggtatggtgtaaaaacttacatatgcacattttgttacatcatttaagatgattgaagctttactggttaagtatagggtcaccagagaaagttcctttccccagttgatgtcttgaggctgttgagaaacttaggacagaagcctacctcatcccaggcctgcccctccgtgcatagctctgcctttgggtcttgttcatagtgctgttcaggcaaaatggaatagtctcaggtgggaacaccttctcttgctagctccaggaaggctttgtgggaaatgagttgagaccatggacttgggagttgggggccagagttgagcctggacttgaccaattaattcccttacctttcagcccaagatagctacatgtctttacttgctgtataagttttccttttgtcctgggggtgcctgattgatcctatctcttcacccttcattctttcaacaaacatgccatctatctcccaggacatttattcccttctattcaaggccagttaggaatgcaattatttttttttttcagttaaatacagacttgtttggacgcaaggtaccctttctctttttaaaaactttttatcatgaaaactttcaaatacaaaaataaaatggtagagtgaacctccatgtacccagcatccagctccagtaaccatcaacgtgtaccattatttca

SEQ ID NO: 256 - DNA, 5720 bp, Homo sapiens
gcagccgcctctcgcccggccagacccgggcggcgccggccgcctcgccggccgcaggtccgcctccgccgcgccgagggcgtgggctcccggctcccggaagcggcggccgcggcgcggagccgagcgggcgtccgtcgccggagctgcaatgagcggcgcccggaggctgtgacctgcgcgcggcggcccgaccggggcccctgaatggcggctcgctgaggcggcggcggcggcggcggcggctcaggctcctcggggcgtggcgtggcggtgaaggggtgatgctgttcaagctcctgcagagacagacctatacctgcctgtcccacaggtatgggctctacgtgtgcttcttgggcgtcgttgtcaccatcgtctccgccttccagttcggagaggtggttctggaatggagccgagatcaataccatgttttgtttgattcctatagagacaatattgctggaaagtcctttcagaatcggctttgtctgcccatgccgattgacgttgtttacacctgggtgaatggcacagatcttgaactactgaaggaactacagcaggtcagagaacagatggaggaggagcagaaagcaatgagagaaatccttgggaaaaacacaacggaacctactaagaagagtgagaagcagttagagtgtttgctaacacactgcattaaggtgccaatgcttgtcctggacccagccctgccagccaacatcaccctgaaggacctgccatctctttatccttcttttcattctgccagtgacattttcaatgttgcaaaaccaaaaaacccttctaccaatgtctcagttgttgtttttgacagtactaaggatgttgaagatgcccactctggactgcttaaaggaaatagcagacagacagtatggaggggctacttgacaacagataaagaagtccctggattagtgctaatgcaagatttggctttcctgagtggatttccaccaacattcaaggaaacaaatcaactaaaaacaaaattgccagaaaatctttcctctaaagtcaaactgttgcagttgtattcagaggccagtgtagcgcttctaaaactgaataaccccaaggattttcaagaattgaataagcaaactaagaagaacatgaccattgatggaaaagaactgaccataagtcctgcatatttattatgggatctgagcgccatcagccagtctaagcaggatgaagacatctctgccagtcgttttgaagataacgaagaactgaggtactcattgcgatctatcgagaggcatgcaccatgggttcggaatattttcattgtcaccaacgggcagattccatcctggctgaaccttgacaatcctcgagtgacaatagtaacacaccaggatgtttttcgaaatttgagccacttgcctacctttagttcacctgctattgaaagtcacattcatcgcatcgaagggctgtcccagaagtttatttacctaaatgatgatgtcatgtttgggaaggatgtctggccagatgatttttacagtcactccaaaggccagaaggtttatttgacatggcctgtgccaaactgtgccgagggctgcccaggttcctggattaaggatggctattgtgacaaggcttgtaataattcagcctgcgattgggatggtggggattgctctggaaacagtggagggagtcgctatattgcaggaggtggaggtactgggagtattggagttggacagccctggcagtttggtggaggaataaacagtgtctcttactgtaatcagggatgtgcgaattcctggctcgctgataagttctgtgaccaagcatgcaatgtcttgtcctgtgggtttgatgctggcgactgtgggcaagatcattttcatgaattgtataaagtgatccttctcccaaaccagactcactatattattccaaaaggtgaatgcctgccttatttcagctttgcagaagtagccaaaagaggagttgaaggtgcctatagtgacaatccaataattcgacatgcttctattgccaacaagtggaaaaccatccacctcataatgcacagtggaatgaatgccaccacaatacattttaatctcacgtttcaaaatacaaacgatgaagagttcaaaatgcagataacagtggaggtggacacaagggagggaccaaaactgaattctacagcccagaagggttacgaaaatttagttagtcccataacacttcttccagaggcggaaatcctttttgaggatattcccaaagaaaaacgcttcccgaagtttaagagacatgatgttaactcaacaaggagagcccaggaagaggtgaaaattcccctggtaaatatttcactccttccaaaagacgcccagttgagtctcaataccttggatttgcaactggaacatggagacatcactttgaaaggatacaatttgtccaagtcagccttgctgagatcatttctgatgaactcacagcatgctaaaataaaaaatcaagctataataacagatgaaacaaatgacagtttggtggctccacaggaaaaacaggttcataaaagcatcttgccaaacagcttaggagtgtctgaaagattgcagaggttgacttttcctgcagtgagtgtaaaagtgaatggtcatgaccagggtcagaatccacccctggacttggagaccacagcaagatttagagtggaaactcacacccaaaaaaccataggcggaaatgtgacaaaagaaaagcccccatctctgattgttccactggaaagccagatgacaaaagaaaagaaaatcacagggaaagaaaaagagaacagtagaatggaggaaaatgctgaaaatcacataggcgttactgaagtgttacttggaagaaagctgcagcattacacagatagttacttgggctttttgccatgggagaaaaaaaagtatttccaagatcttctcgacgaagaagagtcattgaagacacaattggcatacttcactgatagcaaaaatactgggaggcaactaaaagatacatttgcagattccctcagatatgtaaataaaattctaaatagcaagtttggattcacatcgcggaaagtccctgctcacatgcctcacatgattgaccggattgttatgcaagaactgcaagatatgttccctgaagaatttgacaagacgtcatttcacaaagtgcgccattctgaggatatgcagtttgccttctcttatttttattatctcatgagtgcagtgcagccactgaatatatctcaagtctttgatgaagttgatacagatcaatctggtgtcttgtctgacagagaaatccgaacactggctaccagaattcacgaactgccgttaagtttgcaggatttgacaggtctggaacacatgctaataaattgctcaaaaatgcttcctgctgatatcacgcagctaaataatattccaccaactcaggaatcctactatgatcccaacctgccaccggtcactaaaagtctagtaacaaactgtaaaccagtaactgacaaaatccacaaagcatataaggacaaaaacaaatataggtttgaaatcatgggagaagaagaaatcgcttttaaaatgattcgtaccaacgtttctcatgtggttggccagttggatgacataagaaaaaaccctaggaagtttgtttgcctgaatgacaacattgaccacaatcataaagatgctcagacagtgaaggctgttctcagggacttctatgaatccatgttccccataccttcccaatttgaactgccaagagagtatcgaaaccgtttccttcatatgcatgagctgcaggaatggagggcttatcgagacaaattgaagttttggacccattgtgtactagcaacattgattatgtttactatattctcattttttgctgagcagttaattgcacttaagcggaagatatttcccagaaggaggatacacaaagaagctagtcccaatcgaatcagagtatagaagatcttcatttgaaaaccatctacctcagcatttactgagcattttaaaactcagcttcacagagatgtctttgtgatgtgatgcttagcagtttggcccgaagaaggaaaatatccagtaccatgctgttttgtggcatgaatatagcccactgaccaggaattatttaaccaacccactgaaaacttgtgtgttgagcagctctgaactgattttacttttaaagaatttgctcatggacctgtcatcctttttataaaaaggctcactgacaagagacagctgttaatttcccacagcaatcattgcagactaactttattaggagaagcctatgccagctgggagtgattgctaagaggctccagtctttgcattccaaagccttttgctaaagttttgcactttttttttttcatttcccatttttaagtagttactaagttaactagttattcttgcttctgagtataacgaattgggatgtctaaacctatttttatagatgttatttaaataatgcagcaatatcacctcttattgacaatacctaaattatgagttttattaatatttaagactgtaaatggtcttaaaccactaactactgaagagctcaatgattgacatctgaaatgctttgtaattattgacttcagcccctaagaatgctatgatttcacgtgcaggtctaatttcaaagggctagagttagtactacttaccagatgtaattatgttttggaaatgtacatattcaaacagaagtgcctcattttagaaatgagtagtgctgatggcactggcacattacagtggtgtcttgtttaatactcattggtatattccagtagctatctctctcagttggtttttgatagaacagaggccagcaaactttctttgtaaaaggctggttagtaaattattgcaggccacctgtgtctttgtcatacattcttcttgctgttgtttagtttgttttttttcaaacaaccctctaaaaatgtaaaaaccatgtttagcttgcagctgtacaaaaactgcccaccagccagatgtgaccctcaggccatcatttgccaatcactgagaattagtttttgttgttgttgttgttgttgtttttgagacagagtctctctctgttgcccaggctggagtgcagtggcgcaatctcagctcactgcaacctccgcctcccgggttcaagcagttctgtctcagccttctgagtagctgggactacaggtgcatgccaccacaccctgctaatttttgtatttttagtagagacgggggttccaccatattggtcaggcttatcttgaactcctgacctcaggtgatccacctgcctctgcctcccaaagtgctgagattacaggcataagccagtgcacccagccgagaattagtatttttatgtatggttaaaccttggcgtctagccatattttatgtcataatacaatggatttgtgaagagcagattccatgagtaactctgacaggtattttagatcatgatctcaacaatattcttccaaaatggcatacatcttttgtacaaagaacttgaaatgtaaatactgtgtttgtgctgtaagagttgtgtatttcaaaaactgaaatctcataaaaagttaaatttttgtctga

SEQ ID NO: 257 - DNA, 4139 bp, Homo sapiens
gcattcctgaccggcacctggcgaggctcatgcgtcccgtgagggcggttcctcgagcctgggggcgctcagattgctttggagacgctgagagaacctttgcgagagcgccggttgacgtgcggagtgcggggctccgggggactgagcagcacgagaccccatcctcccctccgggttttcacactgggcgaagggaggactcctgagctctgcctcttccagtaacattgaggattactgtgttttgtgagagctcgctaggcgccctaagcaacagagttctgagaaatcgagaaacatgataaggaattggctgactatttttatcctttttcccctgaagctcgtagagaaatgtgagtcaagcgtcagcctcactgttcctcctgtcgtaaagctggagaacggcagctcgaccaacgtcagcctcaccctgcggccaccattaaatgcaaccctggtgatcacttttgaaatcacatttcgttccaaaaatattactatccttgagctccccgatgaagttgtggtgcctcctggagtgacaaactcctcttttcaagtgacatctcaaaatgttggacaacttactgtttatctacatggaaatcactccaatcagaccggcccgaggatacgctttcttgtgatccgcagcagcgccattagcatcataaaccaggtgattggctggatctactttgtggcctggtccatctccttctaccctcaggtgatcatgaattggaggcggaaaagtgtcattggtctgagcttcgacttcgtggctctgaacctgacgggcttcgtggcctacagtgtattcaacatcggcctcctctgggtgccctacatcaaggagcagtttctcctcaaataccccaacggagtgaaccccgtgaacagcaacgacgtcttcttcagcctgcacgcggttgtcctcacgctgatcatcatcgtgcagtgctgcctgtatgagcgcggtggccagcgcgtgtcctggcctgccatcggcttcctggtgctcgcgtggctcttcgcatttgtcaccatgatcgtggctgcagtgggagtgaccacgtggctgcagtttctcttctgcttctcctacatcaagctcgcagtcacgctggtcaagtattttccacaggcctacatgaacttttactacaaaagcactgagggctggagcattggcaacgtgctcctggacttcaccgggggcagcttcagcctcctgcagatgttcctccagtcctacaacaacgaccagtggacgctgatcttcggagacccaaccaagtttggactcggggtcttctccatcgtcttcgacgtcgtcttcttcatccagcacttctgtttgtacagaaagagaccggggtatgaccagctgaactagcacccagggacccagtgtacccagcctctggcctcgtgccctgctggggaaggcctcacccagcgaaggccggagaagcggttgggccctggcacacagggctggctcagtgtgcggacagaggagaccactctgctcctggggccagaggccattcaatagcctgccttcgtccgggcccctcctgggcctccccggccaggcacgtggcaccgtcgccttgacaccgccatctcttttctttaaggcttcaggcagcgcgcacaggctctggcagccgtctcaggcaggactgggcaccaagcttgcagccgaaggccttgccccaaactaccagcgtttctgcaagcagcttgaagggctgaccttgcagccgggtgagccaagggcactttgctgccaccgctgcattcccagagatcaagcagcccggtgccgtggccagtgaactcagaggtgctggtggacgggctaggactttggggttaggccatggggctctttctctgaaggccactttcctgacgtactctctgtacataactcagcgtccgtgactgcagtaacagccagccctacccagagtatttctgagccatgaggggcccaccagattggttctgaattggattcatgcccagcgcattagcatagtaactcctttcagattttttggagggacgtttggaagtggcttactctcttctgccctctctcctacctccaccttctcagattagccccatctgagcacatccagctgctccttacccagcatctggagtacaggacatagctctctcctgctaccagtctgtgccttagaggtctgttaggcctgccaaacggcgaccagctcccctggagcgagggcaggccccttccctctctttccccagacacctacttgagactcaccaatttctggcctgttcaggagcctcagataagtatttgtacttgagaccacctcacacaatctgtatgggcccaaccctgatctcaaacctccttccctctgcccaaagctgtccttcctatggcaggaggggtgggggtcccaggacgtgcctcatacatgacttgagcttgtcagtccactgagtttccttctacgagatcaacgcgaggggcctgtatcttgaattaaaacctactcgcttcctttctgcactctgtgtgctcgatacagaaggcaggtgtgctggccttcagagccaggtgccctgctcccctcgtgtaaggaagcgcataaggttgtgaaggtcactgacccgagagcgctgcgtgctgaccccacacttcactggggagccctcttgggtagcgcgagacgcctacccgcccagggccaggtcagtctcccaggctccgtgtcttcacggttaccagggcacgccactcaatctggatgtgagccggggtggatgaggttctgaagggcacaccagcactgggagcgggggcagtgggggtcttattctccagacgcttcctctatctagttgtaacaaacgtcaaagaatgtcaggtcttgtttctgcagagcagactttggcctgacggggtccacagacctgtttcacttgcaacacccagtaaatgtgttactgggtgccctactttaaaaatcagagatttcaaatgattgacttttccggctgagtgcggtggctcacgcctgtaatcccagcactttgggaggccaaggcagatggatcacctgacatcaggagttcgagaccagcctagccaacattgcaaaaccccatctctactaaagatacaaaaattagctgggcatggtggcgggcacctgtaatcccagctacttggttggctgaggcaggagaattacttgaacccaggaggcggaggttgcagtgagcgaagatcacgccattgcactccagcctgggcaacaagaacgaaactccatctcaaaaaaaaaaaaaaattattgacttttctttaaaatctgatttggcagtgctaggtaggtccaggagtgctaacaccttcccagaggtggtacgcaggtagtcaggtgctctctgactcacccccatctggccagatcacggcccccagcaacacgtggggttgtgtccctcgctgggatacacggagtgcccttataggcagggagtcttataggcaggggtctctcccaggcacctctgggtgtccctacggcccctcccaggtgggagctgaggctaggttgcaaaaaggaggttgggagcaagtaggggcttcacagtaacacccaagaaagcacacgcaccccagggtcccaccccagtgctcccagacactcccacagatgtggttctggtcaggcgcagtgcagctgctgcggctccaccagccccgggctttcaggcaggtgggcctgggagtagttgagctttgtcccagaacagtgggggatggggccatcattaaaaccacagctctggccccaatatcccaccgccacccccaccccgatatcccagcccatgcctcagcaaagccccctgtgaattccagcatttttattgagcgcaccacatcggggaggggcggcagtggtttccacggtaaccaaagtaaggcttgtgcacttgctgagcttccagatgcgaattagtaaaagctaaattcaaaagtagaatgggcatctccaaagagtacgataaaaacattttgtatcaaacttgtgattaaaaaaatacaaaagttaaaccca

SEQ ID NO: 258 - DNA, 3292 bp, Homo sapiens
gcccccgccccgcccggtccagccagctcggcccgggggcttcgggctgtcgggccggcgctcccttctctgccaggtggcgagtacacctgctcacgtaggcgtcatgaggtctccggttcgagacctggcccggaacgatggcgaggagagcacggaccgcacgcctcttctaccgggcgccccacgggccgaagccgctccagtgtgctgctctgctcgttacaacttagcaattttggccttttttggtttcttcattgtgtatgcattacgtgtgaatctgagtgttgcgttagtggatatggtagattcaaatacaactttagaagataatagaacttccaaggcgtgtccagagcattctgctcccataaaagttcatcataatcaaacgggtaagaagtaccaatgggatgcagaaactcaaggatggattctcggttcctttttttatggctacatcatcacacagattcctggaggatatgttgccagcaaaataggggggaaaatgctgctaggatttgggatccttggcactgctgtcctcaccctgttcactcccattgctgcagatttaggagttggaccactcattgtactcagagcactagaaggactaggagagggtgttacatttccagccatgcatgccatgtggtcttcttgggctccccctcttgaaagaagcaaacttcttagcatttcatatgcaggagcacagcttgggacagtaatttctcttcctctttctggaataatttgctactatatgaattggacttatgtcttctacttttttggtactattggaatattttggtttcttttgtggatctggttagttagtgacacaccacaaaaacacaagagaatttcccattatgaaaaggaatacattctttcatcattaagaaatcagctttcttcacagaagtcagtgccgtgggtacccattttaaaatccctgccactttgggctatcgtagttgcacacttttcttacaactggactttttatactttattgacattattgcctacttatatgaaggagatcctaaggttcaatgttcaagagaatgggtttttatcttcattgccttatttaggctcttggttatgtatgatcctgtctggtcaagctgctgacaatttaagggcaaaatggaatttttcaactttatgtgttcgcagaatttttagccttataggaatgattggacctgcagtattcctggtagctgctggcttcattggctgtgattattctttggccgttgctttcctaactatatcaacaacactgggaggcttttgctcttctggatttagcatcaaccatctggatattgctccttcgtatgctggtatcctcctgggcatcacaaatacatttgccactattccaggaatggttgggcccgtcattgctaaaagtctgacccctgataacactgttggagaatggcaaaccgtgttctatattgctgctgctattaatgtttttggtgccattttctttacactattcgccaaaggtgaagtacaaaactgggctctcaatgatcaccatggacacagacactgaaggaaccaataaataatcctgcctctattaatgtatttttatttatcatgtaacctcaaagtgccttctgtattgtgtaagcattctatgtctttttttaattgtacttgtattagatttttaaggcctataatcatgaaatatcactagttgccagaataataaaatgaactgtgtttaattatgaataatatgtaagctaggacttctactttaggttcacatacctgcctgctagtcgggcaacatgaagtaggacagttctgttgattttttagggccatactaaagggaatgagctgaaacagacctcctgatacctttgcttaattaaactagatgataattctcaggtactgataaacacctgttgttgttcactttcctcataaaaattgtcagctctctctgacacttagacctcaaactttagcatctctgtggagctgccatccactgtataatttcgcctggcaactggactgaggggagtgtgcccaggcagctgccaagcactccctccctggcttcagggtcagagtgcccagcgtttatcagaggcagcatccaagcccagagccagtgtcgactcttcggctggtgcctttcctctgaggggctatcaatgtgtagataaagccctgagtaggcaagagcagtgagatccactgctatggtcttgatacatcctcaaactttcccttcccagcacagaggaatattggctggcatgcaacctgcaaaagaaaaatgcgaagcggccgggcacggtggctcatgcctgtaatcccagcactttggggggctgaggtgggcgaatcatgagatcaggagttcgagaccagcctggccagcatggtgaaaccccatctctactaaaaatacaaaaaattagctgggcgtggtgacgggcgcctgtaatcccagatactcaggaggctgaggtaggagaatcacttgaacctgggaggtggaagttgcagtgaaccaagatcacgccactgcactccagcctgggcgatggagcgagactccaactcaaaaaaaaaaaaagaataaagaaagaaaagtgcgatgcccagtcaatcacaaataagatcatcctggtttaaatctactctcacatggatcacagtataaatttctatgtgctgtgttttgttcgtttgtattttgtagagatggggtctcgttttgtcgcccaggctggttttgaactcctggcttcaagcgatcctcctgtctcggcctcacaaagtgttgagactacaggcatgagccactgtgcccagcctgttctatgtttttaagctacacgagaattttttttttaattaattctcactgtttgttcagtctgtcttcatctaagtttgtgttgcagtttaaagttaaagtgacttttaaaggccacatcacctgagactagggtaatcatctttacttctggttcctgaaatcatatttttccagtggaccatcctccagtggctgtggttgttgagcatgctttcagaacacctatgtggcttaaaacttagtttatgttttgtgttcaacactacgtgtaatattttaaaactgtttaatgtgatgtgaatacatttatgtacatttatttttaaatttgtaaatagctttaaattgctatggcaatgtttcttttataaatcatcaaaataaacctttgtgaattga

SEQ ID NO: 259 - DNA, 1879 bp, Homo sapiens
gtgctgtcacgtgatccgacaaacggcctctgcatagtgcagaacattctgctgctcttaaaggtacaggcctcagggtccctgctgtagacggggcgggggagagtacgatgggtggggcgtggtgggtcgtagggcgctcgagatggagcccccagcttccttgatggatcgcggggcgcgagtgccctagacaagccggagctgggaccggcaatcgggcgttgatccttgtcacctgtcgcagaccctcatccctcccgtgggagccccctttggacactctatgaccctggaccctcgggggacctgaacttgatgcgatgggaggctgtgcaggctcgcggcggcgcttttcggattccgagggggaggagaccgtcccggagccccggctccctctgttggaccatcagggcgcgcattggaagaacgcggtgggcttctggctgctgggcctttgcaacaacttctcttatgtggtgatgctgagtgccgcccacgacatccttagccacaagaggacatcgggaaaccagagccatgtggacccaggcccaacgccgatcccccacaacagctcatcacgatttgactgcaactctgtctctacggctgctgtgctcctggcggacatcctccccacactcgtcatcaaattgttggctcctcttggccttcacctgctgccctacagcccccgggttctcgtcagtgggatttgtgctgctggaagcttcgtcctggttgccttttctcattctgtggggaccagcctgtgtggtgtggtcttcgctagcatctcatcaggccttggggaggtcaccttcctctccctcactgccttctaccccagggccgtgatctcctggtggtcctcagggactgggggagctgggctgctgggggccctgtcctacctgggcctcacccaggccggcctctcccctcagcagaccctgctgtccatgctgggtatccctgccctgctgctggccagctatttcttgttgctcacatctcctgaggcccaggaccctggaggggaagaagaagcagagagcgcagcccggcagcccctcataagaaccgaggccccggagtcgaagccaggctccagctccagcctctcccttcgggaaaggtggacagtgttcaagggtctgctgtggtacattgttcccttggtcgtagtttactttgccgagtatttcattaaccagggactttttgaactcctctttttctggaacacttccctgagtcacgctcagcaataccgctggtaccagatgctgtaccaggctggcgtctttgcctcccgctcttctctccgctgctgtcgcatccgtttcacctgggccctggccctgctgcagtgcctcaacctggtgttcctgctggcagacgtgtggttcggctttctgccaagcatctacctcgtcttcctgatcattctgtatgaggggctcctgggaggcgcagcctacgtgaacaccttccacaacatcgccctggagaccagtgatgagcaccgggagtttgcaatggcggccacctgcatctctgacacactggggatctccctgtcggggctcctggctttgcctctgcatgacttcctctgccagctctcctgatactcgggatcctcaggacgcaggtcacattcacctgtgggcagagggacaggtcagacacccaggcccaccccagagaccctccatgaactgtgctcccagccttcccggcaggtctgggagtagggaagggctgaagccttgtttcccttgcaggggggccagccattgtctcccacttggggagtttcttcctggcatcatgccttctgaataaatgccgattttatccatggaaa

SEQ ID NO: 260 - DNA, 2504 bp, Homo sapiens
ttattttgattcaccgcagagggcggtctacgagagcgcagagccccactcggccagcggggtctggcgggggacctgtcgcgctgaaagctccagggtagggccgacgcccatcaggctgggcatccgttcgggatgcgcaggttgcgatctgcaaccggcggcgccacgcccaggcgggcggagcgcggttcccggagtctcgcgcccgcggtcatgtgacacagcgaagatggcgtcgcccggctgcctgtggctcttggctgtggctctcctgccatggacctgcgcttctcgggcgctgcagcatctggacccgccggcgccgctgccgttggtgatctggcatgggatgggagacagctgttgcaatcccttaagcatgggtgctattaaaaaaatggtggagaagaaaatacctggaatttacgtcttatctttagagattgggaagaccctgatggaggacgtggagaacagcttcttcttgaatgtcaattcccaagtaacaacagtgtgtcaggcacttgctaaggatcctaaattgcagcaaggctacaatgctatgggattctcccagggaggccaatttctgagggcagtggctcagagatgcccttcacctcccatgatcaatctgatctcggttgggggacaacatcaaggtgtttttggactccctcgatgcccaggagagagctctcacatctgtgacttcatccgaaaaacactgaatgctggggcgtactccaaagttgttcaggaacgcctcgtgcaagccgaatactggcatgaccccataaaggaggatgtgtatcgcaaccacagcatcttcttggcagatataaatcaggagcggggtatcaatgagtcctacaagaaaaacctgatggccctgaagaagtttgtgatggtgaaattcctcaatgattccattgtggaccctgtagattcggagtggtttggattttacagaagtggccaagccaaggaaaccattcccttacaggagacctccctgtacacacaggaccgcctggggctaaaggaaatggacaatgcaggacagctagtgtttctggctacagaaggggaccatcttcagttgtctgaagaatggttttatgcccacatcataccattccttggatgaaacccgtatagttcacaatagagctcagggagcccctaactcttccaaaccacatgggagacagtttccttcatgcccaagcctgagctcagatccagcttgcaactaatccttctatcatctaacatgccctacttggaaagatctaagatctgaatcttatcctttgccatcttctgttaccatatggtgttgaatgcaagtttaattaccatggagattgttttacaaacttttgatgtggtcaagttcagttttagaaaagggagtctgttccagatcagtgccagaactgtgcccaggcccaaaggagacaactaactaaagtagtgagatagattctaagggcaaacatttttccaagtcttgccatatttcaagcaaagaggtgcccaggcctgaggtactcacataaatgctttgttttgctggtgatttaaccagtgcttggaaaaatcttgcttggctatttctgcatcatttcttaaggctgccttcctctctcagtacgttgccctctgtgctatcatcttatcatcaattattagacaaatcccactggcctacagtcttgcttctgcagcacccactttgtctcctcaggtagtgatgaattagttgctgtcacaaaaggagggaagtagcacccaaattaagttgcttaagagaggaaatgtacatcttgtataacttagggagcgaagaaaatgtaggcgcgaaagtgaaaagtgaggcagctagttcttcctattccattctcgaccaacctgccctttcttaatatgactagtggtcttgatgctagagtcaacttactctgttgctggctttagcagagaataggaggaaccatatgaaaaagatcaggctttctgacttccatccccaaaacacatttaccagcatactccaaactgtttctgatgtgttccatgagaaaaggattgtttgctcaaaaagcttggaaaatactacacactccctttctccttctggagatcaacccacattagagtgtctaaggactcctgagaattcctgttacagtaaacaaaactaacgtaatctaccatttcctacactatttgagcatggaaatcatagtccccactctgtgaaaacttaacgctttttggaagacatttctgtagcatgtcagtttggagaaatgatgagctacgccttgatgaaagaaccgtgttggtgctgctaagtttagccattatggtttttcctttctctctcttaagccttattcttcaactaaaagatgaggattaagagcaagaagttgggggggatgtgaaaataattttatgaggttgtctaaaataaagagtagtttcttatc

SEQ ID NO: 261 - DNA, 2084 bp, Homo sapiens
acagatcagctgatgccggagggtttgaagccgcgccgcgagggagcgaggtcgcagtgacagcggcgggcgatcggacccaggctgccccgccgtacccgcctgcgtcccgcgctcccgccccagcatgacagccccggcgggtccgcgcggctcagagaccgagcggcttctgacccccaaccccgggtatgggacccaggcggggccttcaccggcccctccgacacccccagaagaggaagaccttcgccgtcgtctcaaatactttttcatgagtccctgcgacaagtttcgagccaagggccgcaagccctgcaagctgatgctgcaagtggtcaagatcctggtggtcacggtgcagctcatcctgtttgggctcagtaatcagctggctgtgacattccgggaagagaacaccatcgccttccgacacctcttcctgctgggctactcggacggagcggatgacaccttcgcagcctacacgcgggagcagctgtaccaggccatcttccatgctgtggaccagtacctggcgttgcctgacgtgtcactgggccggtatgcgtatgtccgtggtgggggtgacccttggaccaatggctcagggcttgctctctgccagcggtactaccaccgaggccacgtggacccggccaacgacacatttgacattgatccgatggtggttactgactgcatccaggtggatccccccgagcggccccctccgccccccagcgacgatctcaccctcttggaaagcagctccagttacaagaacctcacgctcaaattccacaagctggtcaatgtcaccatccacttccggctgaagaccattaacctccagagcctcatcaataatgagatcccggactgctataccttcagcgtcctgatcacgtttgacaacaaagcacacagtgggcggatccccatcagcctggagacccaggcccacatccaggagtgtaagcaccccagtgtcttccagcacggagacaacagcttccggctcctgtttgacgtggtggtcatcctcacctgctccctgtccttcctcctctgcgcccgctcactccttcgaggcttcctgctgcagaacgagtttgtggggttcatgtggcggcagcggggacgggtcatcagcctgtgggagcggctggaatttgtcaatggctggtacatcctgctcgtcaccagcgatgtgctcaccatctcgggcaccatcatgaagatcggcatcgaggccaagaacttggcgagctacgacgtctgcagcatcctcctgggcacctcgacgctgctggtgtgggtgggcgtgatccgctacctgaccttcttccacaactacaatatcctcatcgccacactgcgggtggccctgcccagcgtcatgcgcttctgctgctgcgtggctgtcatctacctgggctactgcttctgtggctggatcgtgctggggccctatcatgtgaagttccgctcactctccatggtgtctgagtgcctgttctcgctcatcaatggggacgacatgtttgtgacgttcgccgccatgcaggcgcagcagggccgcagcagcctggtgtggctcttctcccagctctacctttactccttcatcagcctcttcatctacatggtgctcagcctcttcatcgcgctcatcaccggcgcctacgacaccatcaagcatcccggcggcgcaggcgcagaggagagcgagctgcaggcctacatcgcacagtgccaggacagccccacctccggcaagttccgccgcgggagcggctcggcctgcagccttctctgctgctgcggaagggacccctcggaggagcattcgctgctggtgaattgattcgacctgactgccgttggaccgtaggccctggactgcagagacccccgcccccgaccccgcttatttatttgtagggtttgcttttaaggatcggctccctgtcgcgcccgaggagggcctggacctttcgtgtcggacccttgggggcggggagactgggtggggagggtgttgaataaaagggaaaataaatgtgtcgttttcattttta

SEQ ID NO: 262 - DNA, 2748 bp, Homo sapiens
gcattgcagactgcggagtcagacggcgctatgtacgccctcttcctcctggccagcctcctgggcgcggctctagccggcccggtccttggactgaaagaatgcaccaggggctcggcagtgtggtgccagaatgtgaagacggcgtccgactgcggggcagtgaagcactgcctgcagaccgtttggaacaagccaacagtgaaatcccttccctgcgacatatgcaaagacgttgtcaccgcagctggtgatatgctgaaggacaatgccactgaggaggagatccttgtttacttggagaagacctgtgactggcttccgaaaccgaacatgtctgcttcatgcaaggagatagtggactcctacctccctgtcatcctggacatcattaaaggagaaatgagccgtcctggggaggtgtgctctgctctcaacctctgcgagtctctccagaagcacctagcagagctgaatcaccagaagcagctggagtccaataagatcccagagctggacatgactgaggtggtggcccccttcatggccaacatccctctcctcctctaccctcaggacggcccccgcagcaagccccagccaaaggataatggggacgtttgccaggactgcattcagatggtgactgacatccagactgctgtacggaccaactccacctttgtccaggccttggtggaacatgtcaaggaggagtgtgaccgcctgggccctggcatggccgacatatgcaagaactatatcagccagtattctgaaattgctatccagatgatgatgcacatgcaacccaaggagatctgtgcgctggttgggttctgtgatgaggtgaaagagatgcccatgcagactctggtccccgccaaagtggcctccaagaatgtcatccctgccctggaactggtggagcccattaagaagcacgaggtcccagcaaagtctgatgtttactgtgaggtgtgtgaattcctggtgaaggaggtgaccaagctgattgacaacaacaagactgagaaagaaatactcgacgcttttgacaaaatgtgctcgaagctgccgaagtccctgtcggaagagtgccaggaggtggtggacacgtacggcagctccatcctgtccatcctgctggaggaggtcagccctgagctggtgtgcagcatgctgcacctctgctctggcacgcggctgcctgcactgaccgttcacgtgactcagccaaaggacggtggcttctgcgaagtgtgcaagaagctggtgggttatttggatcgcaacctggagaaaaacagcaccaagcaggagatcctggctgctcttgagaaaggctgcagcttcctgccagacccttaccagaagcagtgtgatcagtttgtggcagagtacgagcccgtgctgatcgagatcctggtggaggtgatggatccttccttcgtgtgcttgaaaattggagcctgcccctcggcccataagcccttgttgggaactgagaagtgtatatggggcccaagctactggtgccagaacacagagacagcagcccagtgcaatgctgtcgagcattgcaaacgccatgtgtggaactaggaggaggaatattccatcttggcagaaaccacagcattggtttttttctacttgtgtgtctgggggaatgaacgcacagatctgtttgactttgttataaaaatagggctcccccacctcccccatttctgtgtcctttattgtagcattgctgtctgcaagggagcccctagcccctggcagacatagctgcttcagtgccccttttctctctgctagatggatgttgatgcactggaggtcttttagcctgcccttgcatggcgcctgctggaggaggagagagctctgctggcatgagccacagtttcttgactggaggccatcaaccctcttggttgaggccttgttctgagccctgacatgtgcttgggcactggtgggcctgggcttctgaggtggcctcctgccctgatcagggaccctccccgctttcctgggcctctcagttgaacaaagcagcaaaacaaaggcagttttatatgaaagattagaagcctggaataatcaggctttttaaatgatgtaattcccactgtaatagcatagggattttggaagcagctgctggtggcttgggacatcagtggggccaagggttctctgtccctggttcaactgtgatttggctttcccgtgtctttcctggtgatgccttgtttggggttctgtgggtttgggtgggaagagggccatctgcctgaatgtaacctgctagctctccgaaggccctgcgggcctggcttgtgtgagcgtgtggacagtggtggccgcgctgtgcctgctcgtgttgcctacatgtccctggctgttgaggcgctgcttcagcctgcacccctcccttgtctcatagatgctccttttgaccttttcaaataaatatggatggcgagctcctaggcctctggcttcctggtagagggcggcatgccgaagggtctgctgggtgtggattggatgctggggtgtgggggttggaagctgtctgtggcccacttgggcacccacgcttctgtccacttctggttgccaggagacagcaagcaaagccagcaggacatgaagttgctattaaatggacttcgtgatttttgttttgcactaaagtttctgtgatttaacaataaaattctgttagccaga

SEQ ID NO: 263 - DNA, 2976 bp, Homo sapiens
gtcgcgaagtttccagccctgcgagcgccgccgggtcggccgatcgtcccccatacctcggccatgcggcccctgctgctactggccctgctgggctggctgctgctggccgaagcgaagggcgacgccaagccggaggacaaccttttagtcctcacggtggccactaaggagaccgagggattccgtcgcttcaagcgctcagctcagttcttcaactacaagatccaggcgcttggcctaggggaggactggaatgtggagaaggggacgtcggcaggtggagggcagaaggtccggctgctgaagaaagctctggagaagcacgcagacaaggaggatctggtcattctcttcgcagacagctatgacgtgctgtttgcatcggggccccgggagctcctgaagaagttccggcaggccaggagccaggtggtcttctctgctgaggagctcatctacccagaccgcaggctggagaccaagtatccggtggtgtccgatggcaagaggttcctgggctctggaggcttcatcggttatgcccccaacctcagcaaactggtggccgagtgggagggccaggacagcgacagcgatcagctgttttacaccaagatcttcttggacccggagaagagggagcagatcaatatcaccctggaccaccgctgccgtatcttccagaacctggatggagccttggatgaggtcgtgctcaagtttgaaatgggccatgtgagagcgaggaacctggcctatgacaccctcccggtcctgatccatggcaacgggccaaccaagctgcagttgaactacctgggcaactacatcccgcgcttctggaccttcgaaacaggctgcaccgtgtgtgacgaaggcttgcgcagcctcaagggcattggggatgaagctctgcccacggtcctggtcggcgtgttcatcgaacagcccacgccgtttgtgtccctgttcttccagcggctcctgcggctccactacccccagaaacacatgcgacttttcatccacaaccacgagcagcaccacaaggctcaggtggaagagttcctggcacagcatggcagcgagtaccagtctgtgaagctggtgggccctgaggtgcggatggcgaatgcagatgccaggaacatgggcgcagacctgtgccggcaggaccgcagctgcacctactacttcagcgtggatgctgacgtggccctgaccgagcccaacagcctgcggctgctgatccaacagaacaagaacgtcattgccccgctgatgacccggcatgggaggctgtggtcgaacttctggggggctctcagtgcagatggctactatgcccgttccgaggactacgtggacattgtgcaggggcggcgtgttggtgtctggaatgtgccctatatttcaaacatctacttgatcaagggcagtgccctgcggggtgagctgcagtcctcagatctcttccaccacagcaagctggaccccgacatggccttctgtgccaacatccggcagcaggatgtgttcatgttcctgaccaaccggcacacccttggccatctgctctccctagacagctaccgcaccacccacctgcacaacgacctctgggaggtgttcagcaaccccgaggactggaaggagaagtacatccaccagaactacaccaaagccctggcagggaagctggtggagacgccctgcccggatgtctattggttccccatcttcacggaggtggcctgtgatgagctggtggaggagatggagcactttggccagtggtctctgggcaacaacaaggacaaccgcatccagggtggctacgagaacgtgccgactattgacatccacatgaaccagatcggctttgagcgggagtggcacaaattcctgctggagtacattgcgcccatgacggagaagctctaccccggctactacaccagggcccagtttgacctggcctttgtcgtccgctacaagcctgatgagcagccctcactgatgccacaccatgatgcctccaccttcaccatcaacatcgccctgaaccgagtcggggtggattacgagggcgggggctgtcggttcctgcgctacaactgttccatccgagccccaaggaagggctggaccctcatgcaccctggacgactcacgcattaccatgaggggctccccaccaccaggggcacccgctacatcgcagtctccttcgtcgatccctaattggccaggcctgaccctcttggacctttcttctttgccgacaaccactgcccagcagcctctgggacctcggggtcccagggaacccagtccagcctcctggctgttgacttcccattgctcttggagccaccaatcaaagagattcaaagagattcctgcaggccagaggcggaacacacctttatggctggggctctccgtggtgttctggacccagcccctggagacaccattcacttttactgctttgtagtgactcgtgctctccaacctgtcttcctgaaaaaccaaggcccccttcccccacctcttccatggggtgagacttgagcagaacaggggcttccccaagttgcccagaaagactgtctgggtgagaagccatggccagagcttctcccaggcacaggtgttgcaccagggacttctgcttcaagttttggggtaaagacacctggatcagactccaagggctgccctgagtctgggacttctgcctccatggctggtcatgagagcaaaccgtagtcccctggagacagcgactccagagaacctcttgggagacagaagaggcatctgtgcacagctcgatcttctacttgcctgtggggaggggagtgacaggtccacacaccacactgggtcaccctgtcctggatgcctctgaagagagggacagaccgtcagaaactggagagtttctattaaaggtcatttaaacca

SEQ ID NO: 264 - DNA, 4164 bp, Homo sapiens
agcagagcaatcaccaccaagcctggaataactgcaagggctctgctgacatcttcctgaggtgccaaggaaatgaggatggaggaaggaatgaatgttctccatgactttgggatccagtcaacacattacctccaggtgaattaccaagactcccaggactggttcatcttggtgtccgtgatcgcagacctcaggaatgccttctacgtcctcttccccatctggttccatcttcaggaagctgtgggcattaaactcctttgggtagctgtgattggagactggctcaacctcgtctttaagtggattctctttggacagcgtccatactggtgggttttggatactgactactacagcaacacttccgtgcccctgataaagcagttccctgtaacctgtgagactggaccagggagcccctctggccatgccatgggcacagcaggtgtatactacgtgatggtcacatctactctttccatctttcagggaaagataaagccgacctacagatttcggtgcttgaatgtcattttgtggttgggattctgggctgtgcagctgaatgtctgtctgtcacgaatctaccttgctgctcattttcctcatcaagttgttgctggagtcctgtcaggcattgctgttgcagaaactttcagccacatccacagcatctataatgccagcctcaagaaatattttctcattaccttcttcctgttcagcttcgccatcggattttatctgctgctcaagggactgggtgtagacctcctgtggactctggagaaagcccagaggtggtgcgagcagccagaatgggtccacattgacaccacaccctttgccagcctcctcaagaacctgggcacgctctttggcctggggctggctctcaactccagcatgtacagggagagctgcaaggggaaactcagcaagtggctcccattccgcctcagctctattgtagcctccctcgtcctcctgcacgtctttgactccttgaaacccccatcccaagtcgagctggtcttctacgtcttgtccttctgcaagagtgcggtagtgcccctggcatccgtcagtgtcatcccctactgcctcgcccaggtcctgggccagccgcacaagaagtcgttgtaagagatgtggagtcttcggtgtttaaagtcaacaaccatgccagggattgaggaggactactatttgaagcaatgggcactggtatttggagcaagtgacatgccatccattctgccgtcgtggaattaaatcacggatggcagattggagggtcgcctggcttattcccatgtgtgactccagcctgccctcagcacagactctttcagatggaggtgccatatcacgtacaccatatgcaagtttcccgccaggaggtcctcctctctctacttgaatactctcacaagtagggagctcactcccactggaacagcccattttatctttgaatggtcttctgccagcccattttgaggccagaggtgctgtcagctcaggtggtcctcttttacaatcctaatcatattgggtaatgtttttgaaaagctaatgaagctattgagaaagacctgttgctagaagttgggttgttctggattttcccctgaagacttacttattcttccgtcacatatacaaaagcaagacttccaggtagggccagctcacaagcccaggctggagatcctaactgagaattttctacctgtgttcattcttaccgagaaaaggagaaaggagctctgaatctgataggaaaagaaggctgcctaaggaggagtttttagtatgtggcgtatcatgcaagtgctatgccaagccatgtctaaatggctttaattatatagtaatgcactctcagtaatgggggaccagcttaagtataattaatagatggttagtggggtaattctgcttctagtattttttttactgtgcatacatgttcatcgtatttccttggatttctgaatggctgcagtgacccagatattgcactaggtcaaaacattcaggtatagctgacatctcctctatcacattacatcatcctccttataagcccagctctgctttttccagattcttccactggctccacatccaccccactggatcttcagaaggctagagggcgactctggtggtgcttttgtatgtttcaattaggctctgaaatcttgggcaaaatgacaaggggagggccaggattcctctctcaggtcactccagtgttacttttaattcctagagggtaaatatgactcctttctctatcccaagccaaccaagagcacattcttaaaggaaaagtcaacatcttctctctttttttttttttttgagacagggtctcactatgttgcccaggctgctcttgaattcctgggctcaagcagtcctcccaccctaccacagcgtcccgcgtagctgggactacaggtgcaagccactatgtccagctagccaactcctccttgcctgcttttctttttttttctttttttgagacggcgcacctatcacccaggctggagtggagtggcacgatcttggctcactgcaacctcttcctcctggttcaagcgattctcatgtctcagcctcctcagtagctaggactaccggcgtgcaccaccatgccaggctaatttttatatttttagaattttagaagagatgggatttcatcatgttggccaggctggtctcgaactcctgacctcaagtgatccacctgccttggcctcccaaggtgctaggattacaggcatgagccaccgcaccgggccctccttgcctgtttttcaatctcatctgatatgcagagtatttctgccccacccacctaccccccaaaaaaagctgaagcctatttatttgaaagtccttgtttttgctactaattatatagtataccatacattatcattcaaaacaaccatcctgctcataacatctttgaaaagaaaaatatatatgtgcagtattttattaaagcaacattttatttaagaataaagtcttgttaattactatattttagatgcaatgtgatctgaagtttctaattctggcccaactaaatttctagctctgtttccctaaacaaataatttggtttctctgtgcctgcattttccctttggagaagaaaagtgctctctcttgagttgaccgagagtcccattagggatagggagacttaaatgcatccacaggggcacaggcagagttgagcacataaacggaggcccaaaatcagcatagaaccagaaagattcagagttggccaagaatgaacattggctaccagaccacaagtcagcatgagttgctctatggcatcaaattgcaacttgagagtagatgggcagggtcactatcaaattaagcaatcagggcacacaagttgcagtaacacaacaagactaggccagctctggaatccagtaactcagtgtcagcaaggttttgggttatagttcaagaaagtctaaacagagccagtcacagcaccaaggaatgctcaagggagctattgcaggtttctctgctaagagatttatttcatcctgggtgcagggttcgacctccaaaggcctcaaatcatcaccgtatcaatggatttcctgagggtaagctccgctatttcacacctgaactccggagtctgtatattcagggaagattgcattctcctactggatttgggctctcagagggcgttgtgggaaccaggcccctcacagaatcaaatggtcccaaccagggagaaagaaaatagtcttttttttttttttaatagagatgggggtctcactatgctgcccaggctggtcttgaactcctgggttcaagtgatcctcctgcctcagcctcccaaagtgctgggattacagtgtgagccactgcgcttggccagaaatggttttgatctgtctgaactgaaccctactgcttaggcatagccccatccttgataatctatttgctcccaaggaccaagtccaagatccttacaagaaaggtctgccagaaagtaaatactgcccccactccctgaagtttatgaggttgataagaaaacataacagataaagtttattgagtgctaactttatgcca

SEQ ID NO: 265 - DNA, 2312 bp, Homo sapiens
gtcctattcgggctcccgcctctgttcaggacactgggtccccttggagcctccccaggcttaatgattgtccagaaggcggctataaagggagcctgggaggctgggtggaggagggagcagaaaaaacccaactcagcagatctgggaactgtgagagcggcaagcaggaactgtggtcagaggctgtgcgtcttggctggtagggcctgctcttttctaccatggcagcccagggctatggctattatcgcactgtgatcttctcagccatgtttgggggctacagcctgtattacttcaatcgcaagaccttctcctttgtcatgccatcattggtggaagagatccctttggacaaggatgatttggggttcatcaccagcagccagtcggcagcttatgctatcagcaagtttgtcagtggggtgctgtctgaccagatgagtgctcgctggctcttctcttctgggctgctcctggttggcctggtcaacatattctttgcctggagctccacagtacctgtctttgctgccctctggttccttaatggcctggcccaggggctgggctggcccccatgtgggaaggtcctgcggaagtggtttgagccatctcagtttggcacttggtgggccatcctgtcaaccagcatgaacctggctggagggctgggccctatcctggcaaccatccttgcccagagctacagctggcgcagcacgctggccctatctggggcactgtgtgtggttgtctccttcctctgtctcctgctcatccacaatgaacctgctgatgttggactccgcaacctggaccccatgccctctgagggcaagaagggctccttgaaggaggagagcaccctgcaggagctgctgctgtccccttacctgtgggtgctctccactggttaccttgtggtgtttggagtaaagacctgctgtactgactggggccagttcttccttatccaggagaaaggacagtcagcccttgtaggtagctcctacatgagtgccctggaagttgggggccttgtaggcagcatcgcagctggctacctgtcagaccgggccatggcaaaggcgggactgtccaactacgggaaccctcgccatggcctgttgctgttcatgatggctggcatgacagtgtccatgtacctcttccgggtaacagtgaccagtgactcccccaagctctggatcctggtattgggagctgtatttggtttctcctcgtatggccccattgccctgtttggagtcatagccaacgagagtgcccctcccaacttgtgtggcacctcccacgccattgtgggactcatggccaatgtgggcggctttctggctgggctgcccttcagcaccattgccaagcactacagttggagcacagccttctgggtggctgaagtgatttgtgcggccagcacggctgccttcttcctcctacgaaacatccgcaccaagatgggccgagtgtccaagaaggctgagtgaagagagtccaggttccggagcaccatcccacggtggccttccccctgcacgctctgcggggagaaaaggaggggcctgcctggctagccctgaacctttcactttccatttctgcgccttttctgtcacccgggtggcgctggaagttatcagtggctagtgaggtcccagctccctgatcctatgctctatttaaaagataacctttggccttagactccgttagctcctatttcctgccttcagacaaacaggaaacttctgcagtcaggaaggctcctgtacccttcttcttttcctaggccctgtcctgcccgcatcctaccccatccccacctgaagtgaggctatccctgcagctgcagggcactaatgacccttgacttctgctgggtcctaagtcctctcagcagtgggtgactgctgttgccaatacctcagactccagggaaagagaggaggccatcattctcactgtaccactaggcgcagttggatataggtgggaagaaaaggtgacttgttatagaagattaaaactagatttgatactgaacactgtcagtgattcattttttcaaagtgagacagcttccttgggaaatattgtcaatacctgctctttccaccccaaaatggaaagacttcatttccctggaatggggaagctgaagtgtagatggactcctttaaaactcatgcctcctctgccttcacctgaacattgaatagttcaatgattattttagagataaagctattgggttgtggacagattaaataacttgatggagggaa

SEQ ID NO: 266 - DNA, 3325 bp, Homo sapiens
gcgcatgcgccttcctgggacccacggcaggcgcgaatcccagcggccggcgggcggcggggatacttctacatagacataatcaagttttgactatttggaaaccaagcatcattaaaattctctcaaactcctaattgcgaagaatcgataacatttcaagaagtgataacatttctctgaacaagaaaagaagtgattgaccacgttttaaaagtactctggcactggtgctgtgttttcttcccctccctaaatttgaagaactatggagaaatggtacttgatgacagtagtggttttaataggactaacagtacgatggacagtgtctcttaattcttattcaggtgctggtaaaccgcctatgtttggtgattatgaagctcagagacactggcaagaaataacttttaatttaccggtcaaacaatggtattttaacagcagtgataacaatttacagtattggggattggattacccacctcttacagcttatcatagtctcctatgtgcatatgtggcaaagtttataaatccagactggattgctctccatacatcacgtggatatgagagtcaggcacataagctcttcatgcgtacaacagttttaattgctgatctgctgatttacatacctgcagtggttttgtactgttgttgcttaaaagaaatctcaactaagaaaaagattgctaatgcattatgcatcttgctgtatccaggccttattcttatagactatggacattttcaatataattctgtgagtcttggctttgctttgtggggtgttcttggaatatcttgtgactgcgacctcctagggtcactggcattttgcttagctataaattataaacagatggaactttaccacgccttgccatttttttgctttttacttggcaagtgttttaaaaaaggcctcaaaggaaaggggtttgtgttgctagttaagctagcttgtattgttgtggcttccttcgttctctgctggctgccattctttacagaaagggaacaaaccctgcaggttctaagaagactcttcccggttgatcgtggattatttgaggataaagtagccaatatttggtgcagcttcaatgtctttctgaagattaaggatattttgccacgtcacatccaattaataatgagcttttgttctacgtttttgagcctgcttcctgcatgcataaaattaatacttcagccctcttccaaaggattcaaatttacactggttagctgtgcgctatcattctttttattttctttccaagtacatgaaaaatccattctcttggtgtcactaccagtctgcttagttttaagtgaaattccttttatgtctacttggtttttacttgtgtcaacatttagtatgctacctcttctattgaaggatgaactcctaatgccctctgttgtgacaacaatggcattttttatagcttgtgtaacttccttttcaatatttgaaaagacttctgaagaagaactgcagttgaaatccttttccatttctgtgaggaaatatcttccatgttttacatttctttccagaattatacaatatttgtttcttatctcagtcatcactatggtgcttctgacgttgatgactgtcacactggatcctcctcagaaactaccggacttgttttctgtattggtgtgttttgtatcttgcttgaacttcctgttcttcttggtatactttaacattattattatgtgggattccaaaagtggaagaaatcagaagaaaatcagctagctgtattcctaaacaaattgtttcctaaacaaatgtgaaaatgtgaacagtgctgaaaggttttgtgaactttttgctatgtataaatgaaattaccattttgagaaccatggaaccacaggaaaggaaatggtgaaaagtcattgttgtctacacaaaataaatgtatatggagaccaaagaccaatggaggcttgtctaagtactgcttggccaaaacatgtggttttattattcacagctattcaagtggggaaaaaagagaaacatgtccttaatcccattgtttactcaggaaatgcactttttaaatgtctttaaaaaactgagaaatatttcttgatatttgctttgtctaaacctacttccttcatcagaccatatagtgagcttcatgggagaattgagccccttctttttaatggaaatcactaattttggtattcaaacttacattttagaatgcaagtagtgtgtatttcactgtttagaagtcatatcttagggaattaaatttgtgataatctttttaattactgagaaggcaatttaaactgcttgaagtttgaatatgccttattacacatgcaaatttgattgttttaacaaggcaaataaaccataatcttatttatttccaagaatgcatattttaatacaattaaaaatgaattttcctgaatttaaatgtaagctttaacttaactttaagtggtttgagtgaagtcttctaaattacacataatcactggttctaaacttccagaaccattctgtttaattaaacattatattatatatatattattattgacatggttcagggttaccactgccagagcattgattcatgttaacttcatcctattaatactgtatcaccctgtattagcagaagccaatatttattatagtattcaactggtaaaaataatacatgatatccatgttgcagtttctcatataaagatatgttttctttagcctctgtaataaagataatcattttcccatcaacattttttaaggaatatatttcttctttcataagatagccattaaactatattaagtggtggtatattttaatatagtgcaaatcaaaccacatacaaaaaaaaactggttctagacacggacagtcacaggctgatataagaaggtatgtgtttctaagtctggtaaaggaagtgggtttagacaaagcaaaaatctagaaaggtttctttctcaaagcaaatgtgcataaagactcaaagggcaggtcaacgcagaatagcagccttgaatcactgccgaatcagcaagaacattgctgtccatggtcaccatctgtaatcactgtgcccaaatgtcagcatcttggctggctggtgtagctttatttttaaaaatattttttgtaatagtacacttgtgtttaacatagaatgttgacttagataaatgatgaggaagttataaataattggagtagcataactttattatttggaaataaaagtattatgtacatatattagtaaaatgaaa

SEQ ID NO: 267 - DNA, 1552 bp, Homo sapiens
acacaagcggcgcaccgttaagatggcggctgggctgcggaaacgcggccggtccggttccgcggcccaggcagagggactctgcaagcaatggctgcagcgcgcctggcaagagcggcgcctgctgctgcgggagccgcgctacacgctgctggtggccgcctgcctctgcctggcggaggtgggcatcaccttctgggtcattcacagggtggcatacacagagattgactggaaggcctacatggccgaggtagaaggcgtcatcaatggtacctatgactatacccaactgcagggtgacaccggaccacttgtgtacccagctggtttcgtgtacatctttatggggttgtactatgccaccagccgaggcactgacatccgcatggcccagaacatctttgctgtgctctacctggctaccttgctgcttgtcttcttgatctatcaccagacctgcaaggtacctcccttcgtctttttcttcatgtgctgcgcctcttaccgtgtccactccatctttgtgctgcggctcttcaatgacccagtggccatggtgctgctcttcctcagtatcaacctcctgctggcccagcgctggggctggggttgctgctttttcagcctggcagtctctgtgaagatgaatgtgctgctcttcgcccctgggttactgtttcttctcctcacacagtttggcttccgtggggccctccccaagctgggaatctgtgctggccttcaggtggtgctggggctgcccttcctgctggagaaccccagcggctacctgtcccgctcctttgaccttggccgccagtttctgttccactggacagtgaactggcgcttcctcccagaggcgctcttcctgcatcgagccttccacctggccctgttgactgcccacctcaccctgctcctgctgtttgccctctgcaggtggcacaggacaggggaaagtatcttgtcgctgctgagggatccctccaaaaggaaggttccaccccagccccttacacccaaccagatcgtttctaccctcttcacctccaacttcattggcatctgcttcagccgctccctccactaccagttctacgtctggtatttccacacactgccctacctcctgtgggccatgcctgcacgctggctcacacacctgctcaggttgttggtgctggggctcatcgagctctcctggaacacatacccttccacatcctgcagctctgctgccctgcacatatgccatgccgtcatcctgctgcagctctggctgggcccgcagcctttccccaagagcacccaacacagcaagaaagcccactgaagtccacccctttccctcaggacctgagtctaccctcaggacctggggttggttggactctgcccttccaaataaaccttgctaagtccaactctgtgcaacctacatggaggtgggggcagccgatgcctggtccaggctgtgagggacacgtatggagcagataaagaattcactcaagcagtcctaagaggcactttattgcataggatt

SEQ ID NO: 268 - DNA, 2683 bp, Homo sapiens
gcagttgcgggttgtcataacggtccccgccggagtgaggcgaggccgcgtcgctcagttctggccgtctagggcccctgtaaggatgagagcgcagaggacgcagggccgctggaggcgcaggtaacgaagctagggtgcggttgggaccgcggctgagctttttccgggacccgtggtgctgaatggagaggacggagacgaagccgagccgcggctcctagcggcggcgccgatgctcgagctgtagctgccaggcgaggatgtgtggagcgcaggcggcgcggggtaaatgagaggtctcgggccccaggacccccggggcccgggatgagttagcgagggcagccgcgggggccagttccgaccgtgacaggccaaggcgacggccgccgcccgcccgccccttccgtgcagaagcagctgctcctttccgcgcccgcccgcctgcgctcccggccctggagaccatgaggttccgcatctacaaacggaaggtgctaatcctgacgctcgtggtggccgcctgcggcttcgtcctctggagcagcaatgggcgacaaaggaagaacgaggccctcgccccaccgttgctggacgccgaacccgcgcggggtgccggcggccgcggtggggaccacccctctgtggctgtgggcatccgcagggtctccaacgtgtcggcggcttccctggtcccggcggtcccccagcccgaggcggacaacctgacgctgcggtaccggtccctggtgtaccagctgaactttgatcagaccctgaggaatgtagataaggctggcacctgggccccccgggagctggtgctggtggtccaggtgcataaccggcccgaatacctcagactgctgctggactcacttcgaaaagcccagggaattgacaacgtcctcgtcatctttagccatgacttctggtcgaccgagatcaatcagctgatcgccggggtgaatttctgtccggttctgcaggtgttctttcctttcagcattcagttgtaccctaacgagtttccaggtagtgaccctagagattgtcccagagacctgccgaagaatgccgctttgaaattggggtgcatcaatgctgagtatcccgactccttcggccattatagagaggccaaattctcccagaccaaacatcactggtggtggaagctgcattttgtgtgggaaagagtgaaaattcttcgagattatgctggccttatacttttcctagaagaggatcactacttagccccagacttttaccatgtcttcaaaaagatgtggaaactgaagcagcaagagtgccctgaatgtgatgttctctccctggggacctatagtgccagtcgcagtttctatggcatggctgacaaggtagatgtgaaaacttggaaatccacagagcacaatatgggtctagccttgacccggaatgcctatcagaagctgatcgagtgcacagacactttctgtacttatgatgattataactgggactggactcttcaatacttgactgtatcttgtcttccaaaattctggaaagtgctggttcctcaaattcctaggatctttcatgctggagactgtggtatgcatcacaagaaaacctgtagaccatccactcagagtgcccaaattgagtcactcttaaataataacaaacaatacatgtttccagaaactctaactatcagtgaaaagtttactgtggtagccatttccccacctagaaaaaatggagggtggggagatattagggaccatgaactctgtaaaagttatagaagactgcagtgaaaatcacagttacaaaagcgacagtcttctatttttgatatttgtccaaacaggacatacaattgaataaaagagtttaggaactggtttctgctttaatacaaaaacaaaatcttgtaaaaggtgtccaaatacatagtaatcttttccagttatgtctgattaagatttaaaactgaaggtttcattttgggagtagggttttaaagctcaatctgttatctgctaaaattgattattgttgatatgagagaagaggggaaattttatttaaattgcatttattaatctttttatctgaaactttgtacacttttccactttcaaaacctattttaagtacagcaaaatttatttaaaactgtcatagcagtaaaaagtattacgatgaaattgttagggtattaatggaacaaacccagtttcactctcttgacacacttattaggaagggattgcttcactggtttaataatttaaaagttatgtttgttaaacaccctgtcagaacagtcattttcagtattagattcctgtactattgtgttttgagtgtgttttggaaccttcatagaacacactttcttttggaatgtatttgattgataagaaagtttaaacattgttttcacctcaatgtagaaatacagtggttttgtttttttttttcttttagtgctgacaaaataaaatactcatttttgcataaaaaggttcctaatccttttgcagaataagttttgtttactctttataccaaaattcagtgaaggcattctacaagttttgagttagcattacattttaatatttactattgctacattgtataattgagtttgaaataaaacccagcttatgacaatgca

SEQ ID NO: 269 - DNA, 2867 bp, Homo sapiens
gcaggcgctggctggcaggtgtcgctaaccggacggtggtcgccagggcgagaggcgggagccggagaggtgaggcaggacccgggctccactgccgcctctccgagctcttgtgacgcggacctcagtgccaggatggctcggggcgagcggcggcgccgcgcagtgccggcagagggagtgcggacagccgagagggcggctcggggaggccccgggcgacgggacggccggggcggcgggccgcgtagcacggctggaggagtggctctggccgtcgtggtcctgtctttggccctgggtatgtcggggcgctgggtgctggcgtggtaccgtgcgcggcgggcggtcacgctgcactccgcgcctcctgtgttgcctgccgactcctccagccccgccgtggccccggacctcttctggggaacctaccgccctcacgtctacttcggcatgaagacccgcagcccgaagcccctcctcaccggactgatgtgggcgcagcagggcaccaccccggggactcctaagctcaggcacacgtgtgagcagggggacggtgtgggtccctatggctgggagttccacgacggcctctccttcgggcgccaacacatccaggatggggccttaaggctcaccactgagttcgtcaagaggcctgggggtcagcacggaggggactggagctggagagtgactgtagagcctcaggactcaggtacttctgccctccctttggtctccctgttcttctatgtggtgacagatggcaaggaagtcctactaccagaggttggggccaaggggcagttgaagtttatcagtgggcacaccagtgaacttggtgacttccgctttacacttttgccaccaaccagtccaggggatacagcccccaagtatggcagctacaatgtcttctggacctccaacccaggactgcccctgctgacagagatggtaaagagtcgcctaaatagctggtttcagcatcggcccccaggggccccccctgaacgctacctcggcttgccaggatccctgaagtgggaggacagaggtccaagtgggcaagggcaggggcagttcttgatacagcaggtgaccctgaaaattcccatttccatagagtttgtgtttgaatcaggcagtgcccaggcaggaggaaatcaagccctgccaagactggcaggcagtctactgacccaggccctggagagccatgctgaaggctttagagagcgctttgagaagaccttccagctgaaggagaagggcctgagctctggcgagcaggttttgggtcaggctgccctcagcggcctccttggtggaattggctacttctacggacaagggctggtattgccagacatcggggtggaagggtctgagcagaaggtggacccagccctctttccacccgtacctctttttacagcagtgccctcccggtcattcttcccacgaggcttcctttgggatgaaggctttcaccagctggtggttcagcggtgggatccctccctcacccgggaagcccttggccactggctggggctgctaaatgctgatggctggattgggagggagcagatactgggggatgaggcccgagcccgggtgcctccagaattcctagtacaacgagcagtccacgccaaccccccaaccctacttttgcctgtagcccatatgctagaggttggtgaccctgacgacttggctttcctccgaaaggccttgccccgcctgcatgcctggttttcctggctccatcagagccaggcaggcccactgccactatcttaccgctggcggggacgggaccctgccttaccaaccttactgaaccccaagaccctaccctctgggctggatgactacccccgggcttcacacccttcagtaaccgagcggcacctggacctgcgatgttgggtggcactgggtgcccgtgtgctgacgcggctggcagagcatctgggtgaggctgaggtagctgctgagctgggcccactggctgcctcactggaggcagcagagagcctggatgagctgcactgggccccagagctaggagtctttgcagactttgggaaccacacaaaagcagtacagctgaagcccaggccccctcaggggctcgttcgggtggtgggtcggccccaacctcaactgcagtatgtagatgctcttggctatgtcagtctttttcccttgctgctgcgactgctggaccccacctcatcccgccttgggcccctgctggacattctagccgacagccgccatctctggagcccctttggtttacgctcccttgcagcctccagctccttttatggccagcgcaattcagagcatgatcccccctactggcggggtgctgtgtggctcaatgtcaactacctggctttgggagcactccaccactatgggcatctggagggtcctcaccaggctcgggctgccaaactccacggtgagctccgtgccaacgtggtaggcaatgtatggcgccagtaccaggctacaggctttctttgggagcagtacagtgaccgcgatgggcgaggcatgggctgccgccctttccacggctggaccagccttgtcttactggccatggctgaagactactgaagggagggagaggaggggagccaagacactcatgccactctggctctgaagggacaaaggcttctggcttttgcccccagccccttggataccagtaattcaaaccttcctcatttcatctcaggtgtctccttgctgtcatcccacatagccctggggtgaatgtgaatccagagtctatttttctaaataaattggaaaaaacattttgaactcta

SEQ ID NO: 270 - DNA, 280 bp, Artificial Sequence
  Description of Artificial Sequence: Synthetic polynucleotide
ccctggagagtcctttagcagggcaaagtgcaacataggcagaccttaagggatgactcagtaacagataagctttgtgtgcctgcagggggatgggaagagggtggggcaggagagggacataaaagggctctgaggcattgtactgtgaattccttcagtctcctgtttggagaagacagagccaatgaggccctcgttccagggaaacagaatatgctcagcatgacgcagcactccctgaactttccggttacatcacccaatagctgagatcaga

SEQ ID NO: 271 - DNA, 241 bp, Artificial Sequence
  Description of Artificial Sequence: Synthetic polynucleotide
ccctggagagtcctttagcagggcaaagtgcaacataggcagaccttaagggatgactcagtaacagataagctttgtgtgcctgcagggggatgggaagagggtggggcaggagagggacataaaagggctctgaggcattgtactgtgaattccttcagtctcctgctctgctcagccagtcagccctgcctcccttgtttaggaccacacagcactgctgggtgtctgcctttccttg

SEQ ID NO: 272 - skipped

SEQ ID NO: 273 - DNA, 212 bp, Artificial Sequence
  Description of Artificial Sequence: Synthetic polynucleotide
aggttaatttttaaaaagcagtcaaaagtccaagtggcccttggcagcatttactctctctgtttgctctggttaataatctcaggagcacaaacattcctttggagaagacagagccaatgaggccctcgttccagggaaacagaatatgctcagcatgacgcagcactccctgaactttccggttacatcacccaatagctgagatcaga

SEQ ID NO: 274 - DNA, 284 bp, Artificial Sequence
  Description of Artificial Sequence: Synthetic polynucleotide
cactgaacccttgacccctgccctgcagcccccgcagcttgctgtttgcccactctatttgcccagccccagaggttaatttttaaaaagcagtcaaaagtccaagtggcccttggcagcatttactctctctgtttgctctggttaataatctcaggagcacaaacattcctttggagaagacagagccaatgaggccctcgttccagggaaacagaatatgctcagcatgacgcagcactccctgaactttccggttacatcacccaatagctgagatcaga

SEQ ID NO: 275 - DNA, 240 bp, Artificial Sequence
  Description of Artificial Sequence: Synthetic polynucleotide
cactgaacccttgacccctgccctgcagcccccgcagcttgctgtttgcccactctatttgcccagccccagccctggagagtcctttagcagggcaaagtgcaacataggcagaccttaagggatgactcagtaacagataagctttgtgtgcctgcagggggatgggaagagggtggggcaggagagggacataaaagggctctgaggcattgtactgtgaattccttcagtctcctg

SEQ ID NO: 276 - DNA, 241 bp, Artificial Sequence; identical to SEQ ID NO: 271
  Description of Artificial Sequence: Synthetic polynucleotide

SEQ ID NO: 277 - DNA, 168 bp, Artificial Sequence
  Description of Artificial Sequence: Synthetic polynucleotide
ccctggagagtcctttagcagggcaaagtgcaacataggcagaccttaagggatgactcagtaacagataagctttgtgtgcctgcagggggatgggaagagggtggggcaggagagggacataaaagggctctgaggcattgtactgtgaattccttcagtctcctg

SEQ ID NO: 278 - DNA, 174 bp, Artificial Sequence
  Description of Artificial Sequence: Synthetic polynucleotide
ccctggagagtcctttagcagggcaaagtgcaacataggcagaccttaagggatgactcagtaacagataagctttgtgtgcctgcaccctggagagtcctttagcagggcaaagtgcaacataggcagaccttaagggatgactcagtaacagataagctttgtgtgcctgca

SEQ ID NO: 279 - DNA, 159 bp, Artificial Sequence
  Description of Artificial Sequence: Synthetic polynucleotide
cactgaacccttgacccctgccctgcagcccccgcagcttgctgtttgcccactctatttgcccagccccagccctggagagtcctttagcagggcaaagtgcaacataggcagaccttaagggatgactcagtaacagataagctttgtgtgcctgca

SEQ ID NO: 280 - DNA, 207 bp, Artificial Sequence
  Description of Artificial Sequence: Synthetic polynucleotide
agaatgaacattgaactttggactatacctgaggggtgaggtaaacaacaggactataaatggcccgggaggcgccctttggaccttttgcaatcctggcgcactgaacccttgacccctgccctgcagcccccgcagcttgctgtttgcccactctatttgcccagccccagggacagagctgatccttgaactcttaagttccac

SEQ ID NO: 281 - DNA, 313 bp, Artificial Sequence
  Description of Artificial Sequence: Synthetic polynucleotide
aggttaatttttaaaaagcagtcaaaagtccaagtggcccttggcagcatttactctctctgtttgctctggttaataatctcaggagcacaaacattcctgtaccagaatgaacattgaactttggactatacctgaggggtgaggtaaacaacaggactataaatggcccgggaggcgccctttggaccttttgcaatcctggcgcactgaacccttgacccctgccctgcagcccccgcagcttgctgtttgcccactctatttgcccagccccagggacagagctgatccttgaactcttaagttccac

SEQ ID NO: 282 - DNA, 269 bp, Artificial Sequence
  Description of Artificial Sequence: Synthetic polynucleotide
aagcaaatatttgtggttatggattaactcgaactgtttgcccactctatttgccctgtaccagaatgaacattgaactttggactatacctgaggggtgaggtaaacaacaggactataaatggcccgggaggcgccctttggaccttttgcaatcctggcgcactgaacccttgacccctgccctgcagcccccgcagcttgctgtttgcccactctatttgcccagccccagggacagagctgatccttgaactcttaagttccac

SEQ ID NO: 283 - DNA, 258 bp, Artificial Sequence
  Description of Artificial Sequence: Synthetic polynucleotide
ggcgccctttggaccttttgcaatcctggagcaaacagcaaacactgtaccagaatgaacattgaactttggactatacctgaggggtgaggtaaacaacaggactataaatggcccgggaggcgccctttggaccttttgcaatcctggcgcactgaacccttgacccctgccctgcagcccccgcagcttgctgtttgcccactctatttgcccagccccagggacagagctgatccttgaactcttaagttccac

SEQ ID NO: 284 - DNA, 194 bp, Artificial Sequence
  Description of Artificial Sequence: Synthetic polynucleotide
agaatgaacattgaactttggactatacctgaggggtgaggtaaacaacaggactataaatagaatgaacattgaactttggactatacctgaggggtgaggtaaacaacaggactataaatcactgaacccttgacccctgccctgcagcccccgcagcttgctgtttgcccactctatttgcccagccccag

SEQ ID NO: 285 - DNA, 199 bp, Artificial Sequence
  Description of Artificial Sequence: Synthetic polynucleotide
ggcccgggaggcgccctttggaccttttgcaatcctggcgcactgaacccttgacccctgccctgcagcccccgcagcttgctgtttgcccactctatttgcccagccccagccctggagagtcctttagcagggcaaagtgcaacataggcagaccttaagggatgactcagtaacagataagctttgtgtgcctgca

SEQ ID NO: 286 - DNA, 260 bp, Artificial Sequence
  Description of Artificial Sequence: Synthetic polynucleotide
agaatgaacattgaactttggactatacctgaggggtgaggtaaacaacaggactataaatggcccgggaggcgccctttggaccttttgcaatcctggcgcactgaacccttgacccctgccctgcagcccccgcagcttgctgtttgcccactctatttgcccagccccagccctggagagtcctttagcagggcaaagtgcaacataggcagaccttaagggatgactcagtaacagataagctttgtgtgcctgca

SEQ ID NO: 287 - DNA, 101 bp, Artificial Sequence
  Description of Artificial Sequence: Synthetic polynucleotide
agaatgaacattgaactttggactatacctgaggggtgaggtaaacaacaggactataaatggcccgggaggcgccctttggaccttttgcaatcctggcg

SEQ ID NO: 288 - DNA, 201 bp, Artificial Sequence
  Description of Artificial Sequence: Synthetic polynucleotide
gctggtttcttataaaactgatggaagatacaaacactattaaagaactgtttgcatgttgcaaatgatgtccaaagtccaaacattgttaataattaatactccaataaacatcatgtcagaatttctgttttcttttccctttgaacctttgcaggattgccacatcatcaggaccacaccttcatcaggaatgaatat

SEQ ID NO: 289 - DNA, 232 bp, Artificial Sequence
  Description of Artificial Sequence: Synthetic polynucleotide
attggcatcttctattgcttttcctggtgacttcatttttcactcttggctaaaaatgggtctctgatgatttattctatcctgggtgttgacaagctgaagaagttgtgtggggcctgctgccagtaaccctgggtgacgaagcgtgactcaccactccgaggtcagtggggggatggaaggcaggggagtcagctgacaagatctgctgctttgtcaccaggccttctgc

SEQ ID NO: 290 - DNA, 200 bp, Artificial Sequence
  Description of Artificial Sequence: Synthetic polynucleotide
tgaaatgcctgccatatattagtgccctgaagtccaaaggtagaggaaccgagtgtttaaaaattactgtggctgtggagtcaacatgatgtaaaaaaacaaacatttggataacaccaagaagccagatatggttgaaatgttgactggttgacaaaaataatttgggttgcttaatggtgcacaaaggtaatgcaaaa

SEQ ID NO: 291 - DNA, 103 bp, Artificial Sequence; identical to SEQ ID NO: 89
  Description of Artificial Sequence: Synthetic polynucleotide

SEQ ID NO: 292 - DNA, 402 bp, Artificial Sequence; identical to SEQ ID NO: 87
  Description of Artificial Sequence: Synthetic polynucleotide

SEQ ID NO: 293 - DNA, 103 bp, Artificial Sequence; identical to SEQ ID NO: 89
  Description of Artificial Sequence: Synthetic polynucleotide

SEQ ID NO: 294 - DNA, 299 bp, Artificial Sequence
  Description of Artificial Sequence: Synthetic polynucleotide
aggttaatttttaaaaagcagtcaaaagtccaagtggcccttggcagcatttactctctctgtttgctctggttaataatctcaggagcacaaacattccggcccgggaggcgccctttggaccttttgcaatcctggcgcactgaacccttgacccctgccctgcagcccccgcagcttgctgtttgcccactctatttgcccagccccagccctggagagtcctttagcagggcaaagtgcaacataggcagaccttaagggatgactcagtaacagataagctttgtgtgcctgca

SEQ ID NO: 295 - DNA, 212 bp, Artificial Sequence; identical to SEQ ID NO: 90
  Description of Artificial Sequence: Synthetic polynucleotide

SEQ ID NO: 296 - DNA, 499 bp, Artificial Sequence
  Description of Artificial Sequence: Synthetic polynucleotide
tgaaatgcctgccatatattagtgccctgaagtccaaaggtagaggaaccgagtgtttaaaaattactgtggctgtggagtcaacatgatgtaaaaaaacaaacatttggataacaccaagaagccagatatggttgaaatgttgactggttgacaaaaataatttgggttgcttaatggtgcacaaaggtaatgcaaaaaggttaatttttaaaaagcagtcaaaagtccaagtggcccttggcagcatttactctctctgtttgctctggttaataatctcaggagcacaaacattccggcccgggaggcgccctttggaccttttgcaatcctggcgcactgaacccttgacccctgccctgcagcccccgcagcttgctgtttgcccactctatttgcccagccccagccctggagagtcctttagcagggcaaagtgcaacataggcagaccttaagggatgactcagtaacagataagctttgtgtgcctgca

SEQ ID NO: 297 - DNA, 297 bp, Artificial Sequence
  Description of Artificial Sequence: Synthetic polynucleotide
ctttggaccttttgcaatcctggcgcactgaacccttgacccctgccctgcagcccccgcagcttgctgtttgcccactctatttgcccagccccagtgaaatgcctgccatatattagtgccctgaagtccaaaggtagaggaaccgagtgtttaaaaattactgtggctgtggagtcaacatgatgtaaaaaaacaaacatttggataacaccaagaagccagatatggttgaaatgttgactggttgacaaaaataatttgggttgcttaatggtgcacaaaggtaatgcaaaa

SEQ ID NO: 298 - DNA, 212 bp, Artificial Sequence; identical to SEQ ID NO: 90
  Description of Artificial Sequence: Synthetic polynucleotide

SEQ ID NO: 299 - DNA, 304 bp, Artificial Sequence
  Description of Artificial Sequence: Synthetic polynucleotide
gctggtttcttataaaactgatggaagatacaaacactattaaagaactgtttgcatgttgcaaatgatgtccaaagtccaaacattgttaataattaatactccaataaacatcatgtcagaatttctgttttcttttccctttgaacctttgcaggattgccacatcatcaggaccacaccttcatcaggaatgaatatcaggctttcactttctcgccaacttacaaggcctttctgtgtaaacaatacctgaacctttaccccgttgcccggcaacggccaggtctgtgccaagtgtttg

SEQ ID NO: 300 - DNA, 315 bp, Artificial Sequence
  Description of Artificial Sequence: Synthetic polynucleotide
aggttaatttttaaaaagcagtcaaaagtccaagtggcccttggcagcatttactctctctgtttgctctggttaataatctcaggagcacaaacattccggcccgggaggcgccctttggaccttttgcaatcctggcgcactgaacccttgacccctgccctgcagcccccgcagcttgctgtttgcccactctatttgcccagccccagcaggctttcactttctcgccaacttacaaggcctttctgtgtaaacaatacctgaacctttaccccgttgcccggcaacggccaggtctgtgccaagtgtttg

SEQ ID NO: 301 - DNA, 315 bp, Artificial Sequence; identical to SEQ ID NO: 300
  Description of Artificial Sequence: Synthetic polynucleotide

SEQ ID NO: 302 - DNA, 413 bp, Artificial Sequence
  Description of Artificial Sequence: Synthetic polynucleotide
aggttaatttttaaaaagcagtcaaaagtccaagtggcccttggcagcatttactctctctgtttgctctggttaataatctcaggagcacaaacattccggcccgggaggcgccctttggaccttttgcaatcctggcgcactgaacccttgacccctgccctgcagcccccgcagcttgctgtttgcccactctatttgcccagccccaggctggtttcttataaaactgatggaagatacaaacactattaaagaactgtttgcatgttgcaaatgatgtccaaagtccaaacattgttaataattaatactccaataaacatcatgtcagaatttctgttttcttttccctttgaacctttgcaggattgccacatcatcaggaccacaccttcatcaggaatgaatat

SEQ ID NO: 303 - DNA, 268 bp, Artificial Sequence
  Description of Artificial Sequence: Synthetic polynucleotide
aggttaatttttaaaaagcagtcaaaagtccaagtggcccttggcagcatttactctctctgtttgctctggttaataatctcaggagcacaaacattccggcccgggaggcgccctttggaccttttgcaatcctggcgcactgaacccttgacccctgccctgcagcccccgcagcttgctgtttgcccactctatttgcccagccccagaagcaaatatttgtggttatggattaactcgaactgtttgcccactctatttgccc

SEQ ID NO: 304 - DNA, 159 bp, Artificial Sequence
  Description of Artificial Sequence: Synthetic polynucleotide
aagcaaatatttgtggttatggattaactcgaactgtttgcccactctatttgccccaggctttcactttctcgccaacttacaaggcctttctgtgtaaacaatacctgaacctttaccccgttgcccggcaacggccaggtctgtgccaagtgtttg

SEQ ID NO: 305 - DNA, 159 bp, Artificial Sequence; identical to SEQ ID NO: 304
  Description of Artificial Sequence: Synthetic polynucleotide

SEQ ID NO: 306 - DNA, 243 bp, Artificial Sequence
  Description of Artificial Sequence: Synthetic polynucleotide
aggttaatttttaaaaagcagtcaaaagtccaagtggcccttggcagcatttactctctctgtttgctctggttaataatctcaggagcacaaacattccggcccgggaggcgccctttggaccttttgcaatcctggcgcaggctttcactttctcgccaacttacaaggcctttctgtgtaaacaatacctgaacctttaccccgttgcccggcaacggccaggtctgtgccaagtgtttg

SEQ ID NO: 307 - DNA, 243 bp, Artificial Sequence; identical to SEQ ID NO: 306
  Description of Artificial Sequence: Synthetic polynucleotide

SEQ ID NO: 308 - DNA, 335 bp, Artificial Sequence
  Description of Artificial Sequence: Synthetic polynucleotide
attggcatcttctattgcttttcctggtgacttcatttttcactcttggctaaaaatgggtctctgatgatttattctatcctgggtgttgacaagctgaagaagttgtgtggggcctgctgccagtaaccctgggtgacgaagcgtgactcaccactccgaggtcagtggggggatggaaggcaggggagtcagctgacaagatctgctgctttgtcaccaggccttctgccaggctttcactttctcgccaacttacaaggcctttctgtgtaaacaatacctgaacctttaccccgttgcccggcaacggccaggtctgtgccaagtgtttg

SEQ ID NO: 309 - DNA, 304 bp, Artificial Sequence
  Description of Artificial Sequence: Synthetic polynucleotide
caggctttcactttctcgccaacttacaaggcctttctgtgtaaacaatacctgaacctttaccccgttgcccggcaacggccaggtctgtgccaagtgtttggctggtttcttataaaactgatggaagatacaaacactattaaagaactgtttgcatgttgcaaatgatgtccaaagtccaaacattgttaataattaatactccaataaacatcatgtcagaatttctgttttcttttccctttgaacctttgcaggattgccacatcatcaggaccacaccttcatcaggaatgaatat

SEQ ID NO: 310 - DNA, 334 bp, Artificial Sequence
  Description of Artificial Sequence: Synthetic polynucleotide
ctgtttgctgcttgcaatgtttgcccattttagggaggttaatttttaaaaagcagtcaaaagtccaagtggcccttggcagcatttactctctctgtttgctctggttaataatctcaggagcacaaacattccggcccgggaggcgccctttggaccttttgcaatcctggcgcactgaacccttgacccctgccctgcagcccccgcagcttgctgtttgcccactctatttgcccagccccagccctggagagtcctttagcagggcaaagtgcaacataggcagaccttaagggatgactcagtaacagataagctttgtgtgcctgca

SEQ ID NO: 311 - DNA, 236 bp, Artificial Sequence
  Description of Artificial Sequence: Synthetic polynucleotide
ctgtttgctgcttgcaatgtttgcccattttaggggctggtttcttataaaactgatggaagatacaaacactattaaagaactgtttgcatgttgcaaatgatgtccaaagtccaaacattgttaataattaatactccaataaacatcatgtcagaatttctgttttcttttccctttgaacctttgcaggattgccacatcatcaggaccacaccttcatcaggaatgaatat

SEQ ID NO: 312 - DNA, 103 bp, Artificial Sequence; identical to SEQ ID NO: 89
  Description of Artificial Sequence: Synthetic polynucleotide

SEQ ID NO: 313 - DNA, 305 bp, Artificial Sequence; identical to SEQ ID NO: 88
  Description of Artificial Sequence: Synthetic polynucleotide

SEQ ID NO: 314 - DNA, 261 bp, Artificial Sequence
  Description of Artificial Sequence: Synthetic polynucleotide
aagcaaatatttgtggttatggattaactcgaactgtttgcccactctatttgccctgtaccggcccgggaggcgccctttggaccttttgcaatcctggcgcactgaacccttgacccctgccctgcagcccccgcagcttgctgtttgcccactctatttgcccagccccagccctggagagtcctttagcagggcaaagtgcaacataggcagaccttaagggatgactcagtaacagataagctttgtgtgcctgca

SEQ ID NO: 315 - DNA, 250 bp, Artificial Sequence
  Description of Artificial Sequence: Synthetic polynucleotide
ggcgccctttggaccttttgcaatcctggagcaaacagcaaacactgtaccggcccgggaggcgccctttggaccttttgcaatcctggcgcactgaacccttgacccctgccctgcagcccccgcagcttgctgtttgcccactctatttgcccagccccagccctggagagtcctttagcagggcaaagtgcaacataggcagaccttaagggatgactcagtaacagataagctttgtgtgcctgca

SEQ ID NO: 316 - DNA, 366 bp, Artificial Sequence
  Description of Artificial Sequence: Synthetic polynucleotide
aggttaatttttaaaaagcagtcaaaagtccaagtggcccttggcagcatttactctctctgtttgctctggttaataatctcaggagcacaaacattcctgtaccagaatgaacattgaactttggactatacctgaggggtgaggtaaacaacaggactataaatggcccgggaggcgccctttggaccttttgcaatcctggcgcactgaacccttgacccctgccctgcagcccccgcagcttgctgtttgcccactctatttgcccagccccagccctggagagtcctttagcagggcaaagtgcaacataggcagaccttaagggatgactcagtaacagataagctttgtgtgcctgca

SEQ ID NO: 317 - DNA, 322 bp, Artificial Sequence
  Description of Artificial Sequence: Synthetic polynucleotide
aagcaaatatttgtggttatggattaactcgaactgtttgcccactctatttgccctgtaccagaatgaacattgaactttggactatacctgaggggtgaggtaaacaacaggactataaatggcccgggaggcgccctttggaccttttgcaatcctggcgcactgaacccttgacccctgccctgcagcccccgcagcttgctgtttgcccactctatttgcccagccccagccctggagagtcctttagcagggcaaagtgcaacataggcagaccttaagggatgactcagtaacagataagctttgtgtgcctgca

SEQ ID NO: 318 - DNA, 311 bp, Artificial Sequence
  Description of Artificial Sequence: Synthetic polynucleotide
ggcgccctttggaccttttgcaatcctggagcaaacagcaaacactgtaccagaatgaacattgaactttggactatacctgaggggtgaggtaaacaacaggactataaatggcccgggaggcgccctttggaccttttgcaatcctggcgcactgaacccttgacccctgccctgcagcccccgcagcttgctgtttgcccactctatttgcccagccccagccctggagagtcctttagcagggcaaagtgcaacataggcagaccttaagggatgactcagtaacagataagctttgtgtgcctgca

SEQ ID NO: 319 - DNA, 207 bp, Artificial Sequence
  Description of Artificial Sequence: Synthetic polynucleotide
aggttaatttttaaaaagcagtcaaaagtccaagtggcccttggcagcatttactctctctgtttgctctggttaataatctcaggagcacaaacattcctgtaccagaatgaacattgaactttggactatacctgaggggtgaggtaaacaacaggactataaatggcccgggaggcgccctttggaccttttgcaatcctggcg

SEQ ID NO: 320 - DNA, 163 bp, Artificial Sequence
  Description of Artificial Sequence: Synthetic polynucleotide
aagcaaatatttgtggttatggattaactcgaactgtttgcccactctatttgccctgtaccagaatgaacattgaactttggactatacctgaggggtgaggtaaacaacaggactataaatggcccgggaggcgccctttggaccttttgcaatcctggcg

SEQ ID NO: 321 - DNA, 152 bp, Artificial Sequence
  Description of Artificial Sequence: Synthetic polynucleotide
ggcgccctttggaccttttgcaatcctggagcaaacagcaaacactgtaccagaatgaacattgaactttggactatacctgaggggtgaggtaaacaacaggactataaatggcccgggaggcgccctttggaccttttgcaatcctggcg

SEQ ID NO: 322 - DNA, 100 bp, Artificial Sequence; identical to SEQ ID NO: 97
  Description of Artificial Sequence: Synthetic polynucleotide

SEQ ID NO: 323 - DNA, 146 bp, Artificial Sequence
  Description of Artificial Sequence: Synthetic polynucleotide
aggttaatttttaaaaagcagtcaaaagtccaagtggcccttggcagcatttactctctctgtttgctctggttaataatctcaggagcacaaacattcctgtaccggcccgggaggcgccctttggaccttttgcaatcctggcg

SEQ ID NO: 324 - DNA, 172 bp, Artificial Sequence
  Description of Artificial Sequence: Synthetic polynucleotide
tgctctctgacaaagatacggtgggtcccactgatgaactgtgctgccacagtaaatgtagccactatgcctatctccattctgaagatgtgccctgttcaaacatgtcctaatactctgtctctgcaagggtcatcagtagttttccatcttactcaacatcctcccagtg

SEQ ID NO: 325 - DNA, 180 bp, Artificial Sequence
  Description of Artificial Sequence: Synthetic polynucleotide
cctccccgtgttcctgctctttgtccctctgtcctacttagactaatatttgccttgggtactgcaaacaggaaatgggggagggacaggagtagggcggccctgttcaaacatgtcctaatactctgtctctgcaagggtcatcagtagttttccatcttactcaacatcctcccagtg

SEQ ID NO: 326 - DNA, 159 bp, Artificial Sequence
  Description of Artificial Sequence: Synthetic polynucleotide
ccgcccccactgaacccttgacccctgccctgcagcccccgcagcttgctgtttgcccactctatttgcccagccccagccctgttcaaacatgtcctaatactctgtctctgcaagggtcatcagtagttttccatcttactcaacatcctcccagtg

SEQ ID NO: 327 - DNA, 165 bp, Artificial Sequence
  Description of Artificial Sequence: Synthetic polynucleotide
aagctttctgaacagccaaacagagattccaaagttcaggcaccaaagttcagaccctaacagttatttacaagggtcagttaacccctgttcaaacatgtcctaatactctgtctctgcaagggtcatcagtagttttccatcttactcaacatcctcccagtg

SEQ ID NO: 328 - DNA, 140 bp, Artificial Sequence
  Description of Artificial Sequence: Synthetic polynucleotide
aggttaatttttaaaaagcagtcaaaagtccaagtggcccttggcagcatttactctctctgtttgctctggttaataatctcaggagcacaaacattccggcccgggaggcgccctttggaccttttgcaatcctggcg

SEQ ID NO: 329 - DNA, 100 bp, Artificial Sequence; identical to SEQ ID NO: 97
  Description of Artificial Sequence: Synthetic polynucleotide

SEQ ID NO: 330 - DNA, 233 bp, Artificial Sequence
  Description of Artificial Sequence: Synthetic polynucleotide
aggttaatttttaaaaagcagtcaaaagtccaagtggcccttggcagcatttactctctctgtttgctctggttaataatctcaggagcacaaacattcctgtaccggcccgggaggcgccctttggaccttttgcaatcctggcgccctggagagtcctttagcagggcaaagtgcaacataggcagaccttaagggatgactcagtaacagataagctttgtgtgcctgca

SEQ ID NO: 331 - DNA, 265 bp, Artificial Sequence
  Description of Artificial Sequence: Synthetic polynucleotide
aggttaatttttaaaaagcagtcaaaagtccaagtggcccttggcagcatttactctctctgtttgctctggttaataatctcaggagcacaaacattcctgtacccactgaacccttgacccctgccctgcagcccccgcagcttgctgtttgcccactctatttgcccagccccagccctggagagtcctttagcagggcaaagtgcaacataggcagaccttaagggatgactcagtaacagataagctttgtgtgcctgca

SEQ ID NO: 332 - DNA, 469 bp, Artificial Sequence
  Description of Artificial Sequence: Synthetic polynucleotide
caggctttcactttctcgccaacttacaaggcctttctgtgtaaacaatacctgaacctttaccccgttgcccggcaacggccaggtctgtgccaagtgtttgaggttaatttttaaaaagcagtcaaaagtccaagtggcccttggcagcatttactctctctgtttgctctggttaataatctcaggagcacaaacattcctgtaccagaatgaacattgaactttggactatacctgaggggtgaggtaaacaacaggactataaatggcccgggaggcgccctttggaccttttgcaatcctggcgcactgaacccttgacccctgccctgcagcccccgcagcttgctgtttgcccactctatttgcccagccccagccctggagagtcctttagcagggcaaagtgcaacataggcagaccttaagggatgactcagtaacagataagctttgtgtgcctgca

SEQ ID NO: 333 - DNA, 61 bp, Artificial Sequence
  Description of Artificial Sequence: Synthetic oligonucleotide
agaatgaacattgaactttggactatacctgaggggtgaggtaaacaacaggactataaat

SEQ ID NO: 334 - DNA, 364 bp, Artificial Sequence
  Description of Artificial Sequence: Synthetic polynucleotide
caggctttcactttctcgccaacttacaaggcctttctgtgtaaacaatacctgaacctttaccccgttgcccggcaacggccaggtctgtgccaagtgtttgaagcaaatatttgtggttatggattaactcgaactgtttgcccactctatttgccctgtaccggcccgggaggcgccctttggaccttttgcaatcctggcgcactgaacccttgacccctgccctgcagcccccgcagcttgctgtttgcccactctatttgcccagccccagccctggagagtcctttagcagggcaaagtgcaacataggcagaccttaagggatgactcagtaacagataagctttgtgtgcctgca

SEQ ID NO: 335 - DNA, 425 bp, Artificial Sequence
  Description of Artificial Sequence: Synthetic polynucleotide
caggctttcactttctcgccaacttacaaggcctttctgtgtaaacaatacctgaacctttaccccgttgcccggcaacggccaggtctgtgccaagtgtttgaagcaaatatttgtggttatggattaactcgaactgtttgcccactctatttgccctgtaccagaatgaacattgaactttggactatacctgaggggtgaggtaaacaacaggactataaatggcccgggaggcgccctttggaccttttgcaatcctggcgcactgaacccttgacccctgccctgcagcccccgcagcttgctgtttgcccactctatttgcccagccccagccctggagagtcctttagcagggcaaagtgcaacataggcagaccttaagggatgactcagtaacagataagctttgtgtgcctgca

SEQ ID NO: 336 - DNA, 338 bp, Artificial Sequence
  Description of Artificial Sequence: Synthetic polynucleotide
caggctttcactttctcgccaacttacaaggcctttctgtgtaaacaatacctgaacctttaccccgttgcccggcaacggccaggtctgtgccaagtgtttgaagcaaatatttgtggttatggattaactcgaactgtttgcccactctatttgccctgtaccagaatgaacattgaactttggactatacctgaggggtgaggtaaacaacaggactataaatggcccgggaggcgccctttggaccttttgcaatcctggcgcactgaacccttgacccctgccctgcagcccccgcagcttgctgtttgcccactctatttgcccagccccag

SEQ ID NO: 337 - DNA, 140 bp, Artificial Sequence; identical to SEQ ID NO: 328
  Description of Artificial Sequence: Synthetic polynucleotide

SEQ ID NO: 338 - DNA, 203 bp, Artificial Sequence
  Description of Artificial Sequence: Synthetic polynucleotide
aggttaatttttaaaaagcagtcaaaagtccaagtggcccttggcagcatttactctctctgtttgctctggttaataatctcaggagcacaaacattcccaggctttcactttctcgccaacttacaaggcctttctgtgtaaacaatacctgaacctttaccccgttgcccggcaacggccaggtctgtgccaagtgtttg

SEQ ID NO: 339 - DNA, 180 bp, Artificial Sequence; identical to SEQ ID NO: 86
  Description of Artificial Sequence: Synthetic polynucleotide

SEQ ID NO: 340 - DNA, 80 bp, Artificial Sequence; identical to SEQ ID NO: 104
  Description of Artificial Sequence: Synthetic oligonucleotide

SEQ ID NO: 341 - DNA, 146 bp, Artificial Sequence; identical to SEQ ID NO: 323
  Description of Artificial Sequence: Synthetic polynucleotide

SEQ ID NO: 342 - DNA, 356 bp, Artificial Sequence
  Description of Artificial Sequence: Synthetic polynucleotide
ccctggagagtcctttagcagggcaaagtgcaacataggcagaccttaagggatgactcagtaacagataagctttgtgtgcctgcagggggatgggaagagggtggggcaggagagggacataaaagggctctgaggcattgtactgtgaattccttcagtctcctgtttggagaagacagagccaatgaggccctcgttccagggaaacagaatatgctcagcatgacgcagcactccctgaactttccggttacatcacccaatagctgagatcagagggcatataaaacaggggcaaggcacagactcatagcagagcaatcaccaccaagcctggaataactgcagccacc

SEQ ID NO: 343 - DNA, 453 bp, Artificial Sequence
  Description of Artificial Sequence: Synthetic polynucleotide
cctggagagtcctttagcagggcaaagtgcaacataggcagaccttaagggatgactcagtaacagataagctttgtgtgcctgcagggggatgggaagagggtggggcaggagagggacataaaagggctctgaggcattgtactgtgaattccttcagtctcctgctctgctcagccagtcagccctgcctcccttgtttaggaccacacagcactgctgggtgtctgcctttccttgggtaatttttttttctggttaatatttagcaagaattctgcagagtgatcaaaaaaatcaaatactcagtatttcagaaatagattaaataggttacttttttactgataatgtgaaagaatgatataaaaacttgattttcctcaacaacattactttcttttgtaaatgtggtttctacaaagatgaaactactaaaacttacaggccacc

SEQ ID NO: 344 - DNA, 288 bp, Artificial Sequence
  Description of Artificial Sequence: Synthetic polynucleotide
aggttaatttttaaaaagcagtcaaaagtccaagtggcccttggcagcatttactctctctgtttgctctggttaataatctcaggagcacaaacattcctttggagaagacagagccaatgaggccctcgttccagggaaacagaatatgctcagcatgacgcagcactccctgaactttccggttacatcacccaatagctgagatcagagggcatataaaacaggggcaaggcacagactcatagcagagcaatcaccaccaagcctggaataactgcagccacc

SEQ ID NO: 345 - DNA, 360 bp, Artificial Sequence
  Description of Artificial Sequence: Synthetic polynucleotide
cactgaacccttgacccctgccctgcagcccccgcagcttgctgtttgcccactctatttgcccagccccagaggttaatttttaaaaagcagtcaaaagtccaagtggcccttggcagcatttactctctctgtttgctctggttaataatctcaggagcacaaacattcctttggagaagacagagccaatgaggccctcgttccagggaaacagaatatgctcagcatgacgcagcactccctgaactttccggttacatcacccaatagctgagatcagagggcatataaaacaggggcaaggcacagactcatagcagagcaatcaccaccaagcctggaataactgcagccacc

SEQ ID NO: 346 - DNA, 316 bp, Artificial Sequence
  Description of Artificial Sequence: Synthetic polynucleotide
cactgaacccttgacccctgccctgcagcccccgcagcttgctgtttgcccactctatttgcccagccccagccctggagagtcctttagcagggcaaagtgcaacataggcagaccttaagggatgactcagtaacagataagctttgtgtgcctgcagggggatgggaagagggtggggcaggagagggacataaaagggctctgaggcattgtactgtgaattccttcagtctcctggggcatataaaacaggggcaaggcacagactcatagcagagcaatcaccaccaagcctggaataactgcagccacc

SEQ ID NO: 347 - DNA, 411 bp, Artificial Sequence
  Description of Artificial Sequence: Synthetic polynucleotide
ccctggagagtcctttagcagggcaaagtgcaacataggcagaccttaagggatgactcagtaacagataagctttgtgtgcctgcagggggatgggaagagggtggggcaggagagggacataaaagggctctgaggcattgtactgtgaattccttcagtctcctgctctgctcagccagtcagccctgcctcccttgtttaggaccacacagcactgctgggtgtctgcctttccttgtggacttagcccctgtttgctcctccgataactggggtgaccttggttaatattcaccagcagcctcccccgttgcccctctggatccactgcttaaatacggacgaggacagggccctgtctcctcagcttcaggcaccaccactgacctgggacagtgaatcgccacc

SEQ ID NO: 348 - DNA, 338 bp, Artificial Sequence
  Description of Artificial Sequence: Synthetic polynucleotide
ccctggagagtcctttagcagggcaaagtgcaacataggcagaccttaagggatgactcagtaacagataagctttgtgtgcctgcagggggatgggaagagggtggggcaggagagggacataaaagggctctgaggcattgtactgtgaattccttcagtctcctgtggacttagcccctgtttgctcctccgataactggggtgaccttggttaatattcaccagcagcctcccccgttgcccctctggatccactgcttaaatacggacgaggacagggccctgtctcctcagcttcaggcaccaccactgacctgggacagtgaatcgccacc

SEQ ID NO: 349 - DNA, 250 bp, Artificial Sequence
  Description of Artificial Sequence: Synthetic polynucleotide
ccctggagagtcctttagcagggcaaagtgcaacataggcagaccttaagggatgactcagtaacagataagctttgtgtgcctgcaccctggagagtcctttagcagggcaaagtgcaacataggcagaccttaagggatgactcagtaacagataagctttgtgtgcctgcagggcatataaaacaggggcaaggcacagactcatagcagagcaatcaccaccaagcctggaataactgcagccacc

SEQ ID NO: 350 - DNA, 385 bp, Artificial Sequence
  Description of Artificial Sequence: Synthetic polynucleotide
cactgaacccttgacccctgccctgcagcccccgcagcttgctgtttgcccactctatttgcccagccccagccctggagagtcctttagcagggcaaagtgcaacataggcagaccttaagggatgactcagtaacagataagctttgtgtgcctgcactcttttgttttacatgaagggtctggcagccaaagcaatcactcaaagttcaaaccttatcattttttgctttgttcctcttggccttggttttgtacatcagctttgaaaataccatcccagggttaatgctggggttaatttataactaagagtgctctagttttgcaatacaggacatgctataaaaatggaaagatgttgctttctgagagatgcgccacc

SEQ ID NO: 351 - DNA, 283 bp, Artificial Sequence
  Description of Artificial Sequence: Synthetic polynucleotide
agaatgaacattgaactttggactatacctgaggggtgaggtaaacaacaggactataaatggcccgggaggcgccctttggaccttttgcaatcctggcgcactgaacccttgacccctgccctgcagcccccgcagcttgctgtttgcccactctatttgcccagccccagggacagagctgatccttgaactcttaagttccacgggcatataaaacaggggcaaggcacagactcatagcagagcaatcaccaccaagcctggaataactgcagccacc

SEQ ID NO: 352 - DNA, 389 bp, Artificial Sequence
  Description of Artificial Sequence: Synthetic polynucleotide
aggttaatttttaaaaagcagtcaaaagtccaagtggcccttggcagcatttactctctctgtttgctctggttaataatctcaggagcacaaacattcctgtaccagaatgaacattgaactttggactatacctgaggggtgaggtaaacaacaggactataaatggcccgggaggcgccctttggaccttttgcaatcctggcgcactgaacccttgacccctgccctgcagcccccgcagcttgctgtttgcccactctatttgcccagccccagggacagagctgatccttgaactcttaagttccacgggcatataaaacaggggcaaggcacagactcatagcagagcaatcaccaccaagcctggaataactgcagccacc

SEQ ID NO: 353 - DNA, 345 bp, Artificial Sequence
  Description of Artificial Sequence: Synthetic polynucleotide
aagcaaatatttgtggttatggattaactcgaactgtttgcccactctatttgccctgtaccagaatgaacattgaactttggactatacctgaggggtgaggtaaacaacaggactataaatggcccgggaggcgccctttggaccttttgcaatcctggcgcactgaacccttgacccctgccctgcagcccccgcagcttgctgtttgcccactctatttgcccagccccagggacagagctgatccttgaactcttaagttccacgggcatataaaacaggggcaaggcacagactcatagcagagcaatcaccaccaagcctggaataactgcagccacc

SEQ ID NO: 354 - DNA, 334 bp, Artificial Sequence
  Description of Artificial Sequence: Synthetic polynucleotide
ggcgccctttggaccttttgcaatcctggagcaaacagcaaacactgtaccagaatgaacattgaactttggactatacctgaggggtgaggtaaacaacaggactataaatggcccgggaggcgccctttggaccttttgcaatcctggcgcactgaacccttgacccctgccctgcagcccccgcagcttgctgtttgcccactctatttgcccagccccagggacagagctgatccttgaactcttaagttccacgggcatataaaacaggggcaaggcacagactcatagcagagcaatcaccaccaagcctggaataactgcagccacc

SEQ ID NO: 355 - DNA, 270 bp, Artificial Sequence
  Description of Artificial Sequence: Synthetic polynucleotide
agaatgaacattgaactttggactatacctgaggggtgaggtaaacaacaggactataaatagaatgaacattgaactttggactatacctgaggggtgaggtaaacaacaggactataaatcactgaacccttgacccctgccctgcagcccccgcagcttgctgtttgcccactctatttgcccagccccaggggcatataaaacaggggcaaggcacagactcatagcagagcaatcaccaccaagcctggaataactgcagccacc

SEQ ID NO: 356 - DNA, 275 bp, Artificial Sequence; identical to SEQ ID NO: 144
  Description of Artificial Sequence: Synthetic polynucleotide

SEQ ID NO: 357 - DNA, 336 bp, Artificial Sequence
  Description of Artificial Sequence: Synthetic polynucleotide
agaatgaacattgaactttggactatacctgaggggtgaggtaaacaacaggactataaatggcccgggaggcgccctttggaccttttgcaatcctggcgcactgaacccttgacccctgccctgcagcccccgcagcttgctgtttgcccactctatttgcccagccccagccctggagagtcctttagcagggcaaagtgcaacataggcagaccttaagggatgactcagtaacagataagctttgtgtgcctgcagggcatataaaacaggggcaaggcacagactcatagcagagcaatcaccaccaagcctggaataactgcagccacc

SEQ ID NO: 358 - DNA, 327 bp, Artificial Sequence
  Description of Artificial Sequence: Synthetic polynucleotide
agaatgaacattgaactttggactatacctgaggggtgaggtaaacaacaggactataaatggcccgggaggcgccctttggaccttttgcaatcctggcgctcttttgttttacatgaagggtctggcagccaaagcaatcactcaaagttcaaaccttatcattttttgctttgttcctcttggccttggttttgtacatcagctttgaaaataccatcccagggttaatgctggggttaatttataactaagagtgctctagttttgcaatacaggacatgctataaaaatggaaagatgttgctttctgagagatgcgccacc

SEQ ID NO: 359 - DNA, 480 bp, Artificial Sequence
  Description of Artificial Sequence: Synthetic polynucleotide
gctggtttcttataaaactgatggaagatacaaacactattaaagaactgtttgcatgttgcaaatgatgtccaaagtccaaacattgttaataattaatactccaataaacatcatgtcagaatttctgttttcttttccctttgaacctttgcaggattgccacatcatcaggaccacaccttcatcaggaatgaatatccgatgacctaatgattctgagcttggcaaaggtcttatctcccagctcgcccaggcccagtgttccaggaatgtgacctttgctgcagcagccgctggagggggcagaggggatgggctggaggttgagcaaacagagcagcagaaaaggcagttcctcttctccagtgccctccttccctgtctctgcctctccctcccttcctcaggcatcagagcggagacttcagggagaccagagcccagcttgccaggcactgagctagaagccctgccatg

SEQ ID NO: 360 - DNA, 511 bp, Artificial Sequence
  Description of Artificial Sequence: Synthetic polynucleotide
attggcatcttctattgcttttcctggtgacttcatttttcactcttggctaaaaatgggtctctgatgatttattctatcctgggtgttgacaagctgaagaagttgtgtggggcctgctgccagtaaccctgggtgacgaagcgtgactcaccactccgaggtcagtggggggatggaaggcaggggagtcagctgacaagatctgctgctttgtcaccaggccttctgcccgatgacctaatgattctgagcttggcaaaggtcttatctcccagctcgcccaggcccagtgttccaggaatgtgacctttgctgcagcagccgctggagggggcagaggggatgggctggaggttgagcaaacagagcagcagaaaaggcagttcctcttctccagtgccctccttccctgtctctgcctctccctcccttcctcaggcatcagagcggagacttcagggagaccagagcccagcttgccaggcactgagctagaagccctgccatg

SEQ ID NO: 361 - DNA, 479 bp, Artificial Sequence
  Description of Artificial Sequence: Synthetic polynucleotide
tgaaatgcctgccatatattagtgccctgaagtccaaaggtagaggaaccgagtgtttaaaaattactgtggctgtggagtcaacatgatgtaaaaaaacaaacatttggataacaccaagaagccagatatggttgaaatgttgactggttgacaaaaataatttgggttgcttaatggtgcacaaaggtaatgcaaaaccgatgacctaatgattctgagcttggcaaaggtcttatctcccagctcgcccaggcccagtgttccaggaatgtgacctttgctgcagcagccgctggagggggcagaggggatgggctggaggttgagcaaacagagcagcagaaaaggcagttcctcttctccagtgccctccttccctgtctctgcctctccctcccttcctcaggcatcagagcggagacttcagggagaccagagcccagcttgccaggcactgagctagaagccctgccatg

SEQ ID NO: 362 - DNA, 340 bp, Artificial Sequence
  Description of Artificial Sequence: Synthetic polynucleotide
caggctttcactttctcgccaacttacaaggcctttctgtgtaaacaatacctgaacctttaccccgttgcccggcaacggccaggtctgtgccaagtgtttgcctttgcaacagcttatcggaagcaaacaagctgaggggaattgagcaagaatttctgggataccaacagcataggaggaacaaaggacgtagagggagggttgactgtctacacaggacaaagccaatgattaaccaaacctcttgcagatttaaataggatgggaactaggagtggcagcaatcctttctttcagctggagtgctcctcaggagccagccccacccttagaaaag

SEQ ID NO: 363 - DNA, 575 bp, Artificial Sequence
  Description of Artificial Sequence: Synthetic polynucleotide
aggttaatttttaaaaagcagtcaaaagtccaagtggcccttggcagcatttactctctctgtttgctctggttaataatctcaggagcacaaacattccggcccgggaggcgccctttggaccttttgcaatcctggcgcactgaacccttgacccctgccctgcagcccccgcagcttgctgtttgcccactctatttgcccagccccagccctggagagtcctttagcagggcaaagtgcaacataggcagaccttaagggatgactcagtaacagataagctttgtgtgcctgcaccgatgacctaatgattctgagcttggcaaaggtcttatctcccagctcgcccaggcccagtgttccaggaatgtgacctttgctgcagcagccgctggagggggcagaggggatgggctggaggttgagcaaacagagcagcagaaaaggcagttcctcttctccagtgccctccttccctgtctctgcctctccctcccttcctcaggcatcagagcggagacttcagggagaccagagcccagcttgccaggcactgagctagaagccctgcc

SEQ ID NO: 364 - DNA, 488 bp, Artificial Sequence
  Description of Artificial Sequence: Synthetic polynucleotide
aggttaatttttaaaaagcagtcaaaagtccaagtggcccttggcagcatttactctctctgtttgctctggttaataatctcaggagcacaaacattccggcccgggaggcgccctttggaccttttgcaatcctggcgcactgaacccttgacccctgccctgcagcccccgcagcttgctgtttgcccactctatttgcccagccccagccgatgacctaatgattctgagcttggcaaaggtcttatctcccagctcgcccaggcccagtgttccaggaatgtgacctttgctgcagcagccgctggagggggcagaggggatgggctggaggttgagcaaacagagcagcagaaaaggcagttcctcttctccagtgccctccttccctgtctctgcctctccctcccttcctcaggcatcagagcggagacttcagggagaccagagcccagcttgccaggcactgagctagaagccctgcc

SEQ ID NO: 365 - DNA, 575 bp, Artificial Sequence
  Description of Artificial Sequence: Synthetic polynucleotide
tgaaatgcctgccatatattagtgccctgaagtccaaaggtagaggaaccgagtgtttaaaaattactgtggctgtggagtcaacatgatgtaaaaaaacaaacatttggataacaccaagaagccagatatggttgaaatgttgactggttgacaaaaataatttgggttgcttaatggtgcacaaaggtaatgcaaaaaggttaatttttaaaaagcagtcaaaagtccaagtggcccttggcagcatttactctctctgtttgctctggttaataatctcaggagcacaaacattccggcccgggaggcgccctttggaccttttgcaatcctggcgcactgaacccttgacccctgccctgcagcccccgcagcttgctgtttgcccactctatttgcccagccccagccctggagagtcctttagcagggcaaagtgcaacataggcagaccttaagggatgactcagtaacagataagctttgtgtgcctgcagggcatataaaacaggggcaaggcacagactcatagcagagcaatcaccaccaagcctggaataactgcagccacc

SEQ ID NO: 366 - DNA, 688 bp, Artificial Sequence
  Description of Artificial Sequence: Synthetic polynucleotide
aggttaatttttaaaaagcagtcaaaagtccaagtggcccttggcagcatttactctctctgtttgctctggttaataatctcaggagcacaaacattccggcccgggaggcgccctttggaccttttgcaatcctggcgcactgaacccttgacccctgccctgcagcccccgcagcttgctgtttgcccactctatttgcccagccccagtgaaatgcctgccatatattagtgccctgaagtccaaaggtagaggaaccgagtgtttaaaaattactgtggctgtggagtcaacatgatgtaaaaaaacaaacatttggataacaccaagaagccagatatggttgaaatgttgactggttgacaaaaataatttgggttgcttaatggtgcacaaaggtaatgcaaaaccgatgacctaatgattctgagcttggcaaaggtcttatctcccagctcgcccaggcccagtgttccaggaatgtgacctttgctgcagcagccgctggagggggcagaggggatgggctggaggttgagcaaacagagcagcagaaaaggcagttcctcttctccagtgccctccttccctgtctctgcctctccctcccttcctcaggcatcagagcggagacttcagggagaccagagcccagcttgccaggcactgagctagaagccctgcc

SEQ ID NO: 367 - DNA, 580 bp, Artificial Sequence
  Description of Artificial Sequence: Synthetic polynucleotide
gctggtttcttataaaactgatggaagatacaaacactattaaagaactgtttgcatgttgcaaatgatgtccaaagtccaaacattgttaataattaatactccaataaacatcatgtcagaatttctgttttcttttccctttgaacctttgcaggattgccacatcatcaggaccacaccttcatcaggaatgaatatcaggctttcactttctcgccaacttacaaggcctttctgtgtaaacaatacctgaacctttaccccgttgcccggcaacggccaggtctgtgccaagtgtttgccgatgacctaatgattctgagcttggcaaaggtcttatctcccagctcgcccaggcccagtgttccaggaatgtgacctttgctgcagcagccgctggagggggcagaggggatgggctggaggttgagcaaacagagcagcagaaaaggcagttcctcttctccagtgccctccttccctgtctctgcctctccctcccttcctcaggcatcagagcggagacttcagggagaccagagcccagcttgccaggcactgagctagaagccctgcc

SEQ ID NO: 368 - DNA, 391 bp, Artificial Sequence
  Description of Artificial Sequence: Synthetic polynucleotide
aggttaatttttaaaaagcagtcaaaagtccaagtggcccttggcagcatttactctctctgtttgctctggttaataatctcaggagcacaaacattccggcccgggaggcgccctttggaccttttgcaatcctggcgcactgaacccttgacccctgccctgcagcccccgcagcttgctgtttgcccactctatttgcccagccccagcaggctttcactttctcgccaacttacaaggcctttctgtgtaaacaatacctgaacctttaccccgttgcccggcaacggccaggtctgtgccaagtgtttggggcatataaaacaggggcaaggcacagactcatagcagagcaatcaccaccaagcctggaataactgcagccacc

SEQ ID NO: 369 - DNA, 507 bp, Artificial Sequence
  Description of Artificial Sequence: Synthetic polynucleotide
aggttaatttttaaaaagcagtcaaaagtccaagtggcccttggcagcatttactctctctgtttgctctggttaataatctcaggagcacaaacattccggcccgggaggcgccctttggaccttttgcaatcctggcgcactgaacccttgacccctgccctgcagcccccgcagcttgctgtttgcccactctatttgcccagccccagcaggctttcactttctcgccaacttacaaggcctttctgtgtaaacaatacctgaacctttaccccgttgcccggcaacggccaggtctgtgccaagtgtttggggcgactcagatcccagccagtggacttagcccctgtttgctcctccgataactggggtgaccttggttaatattcaccagcagcctcccccgttgcccctctggatccactgcttaaatacggacgaggacagggccctgtctcctcagcttcaggcaccaccactgacctgggacagtgaatcgccacc

SEQ ID NO: 370 - DNA, 689 bp, Artificial Sequence
  Description of Artificial Sequence: Synthetic polynucleotide
aggttaatttttaaaaagcagtcaaaagtccaagtggcccttggcagcatttactctctctgtttgctctggttaataatctcaggagcacaaacattccggcccgggaggcgccctttggaccttttgcaatcctggcgcactgaacccttgacccctgccctgcagcccccgcagcttgctgtttgcccactctatttgcccagccccaggctggtttcttataaaactgatggaagatacaaacactattaaagaactgtttgcatgttgcaaatgatgtccaaagtccaaacattgttaataattaatactccaataaacatcatgtcagaatttctgttttcttttccctttgaacctttgcaggattgccacatcatcaggaccacaccttcatcaggaatgaatatccgatgacctaatgattctgagcttggcaaaggtcttatctcccagctcgcccaggcccagtgttccaggaatgtgacctttgctgcagcagccgctggagggggcagaggggatgggctggaggttgagcaaacagagcagcagaaaaggcagttcctcttctccagtgccctccttccctgtctctgcctctccctcccttcctcaggcatcagagcggagacttcagggagaccagagcccagcttgccaggcactgagctagaagccctgcc

SEQ ID NO: 371 - DNA, 344 bp, Artificial Sequence
  Description of Artificial Sequence: Synthetic polynucleotide
aggttaatttttaaaaagcagtcaaaagtccaagtggcccttggcagcatttactctctctgtttgctctggttaataatctcaggagcacaaacattccggcccgggaggcgccctttggaccttttgcaatcctggcgcactgaacccttgacccctgccctgcagcccccgcagcttgctgtttgcccactctatttgcccagccccagaagcaaatatttgtggttatggattaactcgaactgtttgcccactctatttgcccgggcatataaaacaggggcaaggcacagactcatagcagagcaatcaccaccaagcctggaataactgcagccacc

SEQ ID NO: 372 - DNA, 401 bp, Artificial Sequence
  Description of Artificial Sequence: Synthetic polynucleotide
aagcaaatatttgtggttatggattaactcgaactgtttgcccactctatttgccccaggctttcactttctcgccaacttacaaggcctttctgtgtaaacaatacctgaacctttaccccgttgcccggcaacggccaggtctgtgccaagtgtttgcctttgcaacagcttatcggaagcaaacaagctgaggggaattgagcaagaatttctgggataccaacagcataggaggaacaaaggacgtagagggagggttgactgtctacacaggacaaagccaatgattaaccaaacctcttgcagatttaaataggatgggaactaggagtggcagcaatcctttctttcagctggagtgctcctcaggagccagccccacccttagaaaagccacc

SEQ ID NO: 373 - DNA, 435 bp, Artificial Sequence
  Description of Artificial Sequence: Synthetic polynucleotide
aagcaaatatttgtggttatggattaactcgaactgtttgcccactctatttgccccaggctttcactttctcgccaacttacaaggcctttctgtgtaaacaatacctgaacctttaccccgttgcccggcaacggccaggtctgtgccaagtgtttgccgatgacctaatgattctgagcttggcaaaggtcttatctcccagctcgcccaggcccagtgttccaggaatgtgacctttgctgcagcagccgctggagggggcagaggggatgggctggaggttgagcaaacagagcagcagaaaaggcagttcctcttctccagtgccctccttccctgtctctgcctctccctcccttcctcaggcatcagagcggagacttcagggagaccagagcccagcttgccaggcactgagctagaagccctgcc

SEQ ID NO: 374 - DNA, 485 bp, Artificial Sequence
  Description of Artificial Sequence: Synthetic polynucleotide
aggttaatttttaaaaagcagtcaaaagtccaagtggcccttggcagcatttactctctctgtttgctctggttaataatctcaggagcacaaacattccggcccgggaggcgccctttggaccttttgcaatcctggcgcaggctttcactttctcgccaacttacaaggcctttctgtgtaaacaatacctgaacctttaccccgttgcccggcaacggccaggtctgtgccaagtgtttgcctttgcaacagcttatcggaagcaaacaagctgaggggaattgagcaagaatttctgggataccaacagcataggaggaacaaaggacgtagagggagggttgactgtctacacaggacaaagccaatgattaaccaaacctcttgcagatttaaataggatgggaactaggagtggcagcaatcctttctttcagctggagtgctcctcaggagccagccccacccttagaaaagccacc

SEQ ID NO: 375 - DNA, 519 bp, Artificial Sequence
  Description of Artificial Sequence: Synthetic polynucleotide
aggttaatttttaaaaagcagtcaaaagtccaagtggcccttggcagcatttactctctctgtttgctctggttaataatctcaggagcacaaacattccggcccgggaggcgccctttggaccttttgcaatcctggcgcaggctttcactttctcgccaacttacaaggcctttctgtgtaaacaatacctgaacctttaccccgttgcccggcaacggccaggtctgtgccaagtgtttgccgatgacctaatgattctgagcttggcaaaggtcttatctcccagctcgcccaggcccagtgttccaggaatgtgacctttgctgcagcagccgctggagggggcagaggggatgggctggaggttgagcaaacagagcagcagaaaaggcagttcctcttctccagtgccctccttccctgtctctgcctctccctcccttcctcaggcatcagagcggagacttcagggagaccagagcccagcttgccaggcactgagctagaagccctgcc

SEQ ID NO: 376 - DNA, 611 bp, Artificial Sequence
  Description of Artificial Sequence: Synthetic polynucleotide
attggcatcttctattgcttttcctggtgacttcatttttcactcttggctaaaaatgggtctctgatgatttattctatcctgggtgttgacaagctgaagaagttgtgtggggcctgctgccagtaaccctgggtgacgaagcgtgactcaccactccgaggtcagtggggggatggaaggcaggggagtcagctgacaagatctgctgctttgtcaccaggccttctgccaggctttcactttctcgccaacttacaaggcctttctgtgtaaacaatacctgaacctttaccccgttgcccggcaacggccaggtctgtgccaagtgtttgccgatgacctaatgattctgagcttggcaaaggtcttatctcccagctcgcccaggcccagtgttccaggaatgtgacctttgctgcagcagccgctggagggggcagaggggatgggctggaggttgagcaaacagagcagcagaaaaggcagttcctcttctccagtgccctccttccctgtctctgcctctccctcccttcctcaggcatcagagcggagacttcagggagaccagagcccagcttgccaggcactgagctagaagccctgcc

SEQ ID NO: 377 - DNA, 580 bp, Artificial Sequence
  Description of Artificial Sequence: Synthetic polynucleotide
caggctttcactttctcgccaacttacaaggcctttctgtgtaaacaatacctgaacctttaccccgttgcccggcaacggccaggtctgtgccaagtgtttggctggtttcttataaaactgatggaagatacaaacactattaaagaactgtttgcatgttgcaaatgatgtccaaagtccaaacattgttaataattaatactccaataaacatcatgtcagaatttctgttttcttttccctttgaacctttgcaggattgccacatcatcaggaccacaccttcatcaggaatgaatatccgatgacctaatgattctgagcttggcaaaggtcttatctcccagctcgcccaggcccagtgttccaggaatgtgacctttgctgcagcagccgctggagggggcagaggggatgggctggaggttgagcaaacagagcagcagaaaaggcagttcctcttctccagtgccctccttccctgtctctgcctctccctcccttcctcaggcatcagagcggagacttcagggagaccagagcccagcttgccaggcactgagctagaagccctgcc

SEQ ID NO: 378 - DNA, 410 bp, Artificial Sequence
  Description of Artificial Sequence: Synthetic polynucleotide
ctgtttgctgcttgcaatgtttgcccattttagggaggttaatttttaaaaagcagtcaaaagtccaagtggcccttggcagcatttactctctctgtttgctctggttaataatctcaggagcacaaacattccggcccgggaggcgccctttggaccttttgcaatcctggcgcactgaacccttgacccctgccctgcagcccccgcagcttgctgtttgcccactctatttgcccagccccagccctggagagtcctttagcagggcaaagtgcaacataggcagaccttaagggatgactcagtaacagataagctttgtgtgcctgcagggcatataaaacaggggcaaggcacagactcatagcagagcaatcaccaccaagcctggaataactgcagccacc

SEQ ID NO: 379 - DNA, 512 bp, Artificial Sequence
  Description of Artificial Sequence: Synthetic polynucleotide
ctgtttgctgcttgcaatgtttgcccattttaggggctggtttcttataaaactgatggaagatacaaacactattaaagaactgtttgcatgttgcaaatgatgtccaaagtccaaacattgttaataattaatactccaataaacatcatgtcagaatttctgttttcttttccctttgaacctttgcaggattgccacatcatcaggaccacaccttcatcaggaatgaatatccgatgacctaatgattctgagcttggcaaaggtcttatctcccagctcgcccaggcccagtgttccaggaatgtgacctttgctgcagcagccgctggagggggcagaggggatgggctggaggttgagcaaacagagcagcagaaaaggcagttcctcttctccagtgccctccttccctgtctctgcctctccctcccttcctcaggcatcagagcggagacttcagggagaccagagcccagcttgccaggcactgagctagaagccctgcc

SEQ ID NO: 380 - DNA, 345 bp, Artificial Sequence
  Description of Artificial Sequence: Synthetic polynucleotide
caggctttcactttctcgccaacttacaaggcctttctgtgtaaacaatacctgaacctttaccccgttgcccggcaacggccaggtctgtgccaagtgtttgcctttgcaacagcttatcggaagcaaacaagctgaggggaattgagcaagaatttctgggataccaacagcataggaggaacaaaggacgtagagggagggttgactgtctacacaggacaaagccaatgattaaccaaacctcttgcagatttaaataggatgggaactaggagtggcagcaatcctttctttcagctggagtgctcctcaggagccagccccacccttagaaaagccacc

SEQ ID NO: 381 - DNA, 337 bp, Artificial Sequence
  Description of Artificial Sequence: Synthetic polynucleotide
aagcaaatatttgtggttatggattaactcgaactgtttgcccactctatttgccctgtaccggcccgggaggcgccctttggaccttttgcaatcctggcgcactgaacccttgacccctgccctgcagcccccgcagcttgctgtttgcccactctatttgcccagccccagccctggagagtcctttagcagggcaaagtgcaacataggcagaccttaagggatgactcagtaacagataagctttgtgtgcctgcagggcatataaaacaggggcaaggcacagactcatagcagagcaatcaccaccaagcctggaataactgcagccacc

SEQ ID NO: 382 - DNA, 326 bp, Artificial Sequence
  Description of Artificial Sequence: Synthetic polynucleotide
ggcgccctttggaccttttgcaatcctggagcaaacagcaaacactgtaccggcccgggaggcgccctttggaccttttgcaatcctggcgcactgaacccttgacccctgccctgcagcccccgcagcttgctgtttgcccactctatttgcccagccccagccctggagagtcctttagcagggcaaagtgcaacataggcagaccttaagggatgactcagtaacagataagctttgtgtgcctgcagggcatataaaacaggggcaaggcacagactcatagcagagcaatcaccaccaagcctggaataactgcagccacc

SEQ ID NO: 383 - DNA, 442 bp, Artificial Sequence
  Description of Artificial Sequence: Synthetic polynucleotide
aggttaatttttaaaaagcagtcaaaagtccaagtggcccttggcagcatttactctctctgtttgctctggttaataatctcaggagcacaaacattcctgtaccagaatgaacattgaactttggactatacctgaggggtgaggtaaacaacaggactataaatggcccgggaggcgccctttggaccttttgcaatcctggcgcactgaacccttgacccctgccctgcagcccccgcagcttgctgtttgcccactctatttgcccagccccagccctggagagtcctttagcagggcaaagtgcaacataggcagaccttaagggatgactcagtaacagataagctttgtgtgcctgcagggcatataaaacaggggcaaggcacagactcatagcagagcaatcaccaccaagcctggaataactgcagccacc

SEQ ID NO: 384 - DNA, 398 bp, Artificial Sequence
  Description of Artificial Sequence: Synthetic polynucleotide
aagcaaatatttgtggttatggattaactcgaactgtttgcccactctatttgccctgtaccagaatgaacattgaactttggactatacctgaggggtgaggtaaacaacaggactataaatggcccgggaggcgccctttggaccttttgcaatcctggcgcactgaacccttgacccctgccctgcagcccccgcagcttgctgtttgcccactctatttgcccagccccagccctggagagtcctttagcagggcaaagtgcaacataggcagaccttaagggatgactcagtaacagataagctttgtgtgcctgcagggcatataaaacaggggcaaggcacagactcatagcagagcaatcaccaccaagcctggaataactgcagccacc

SEQ ID NO: 385 - DNA, 387 bp, Artificial Sequence
  Description of Artificial Sequence: Synthetic polynucleotide
ggcgccctttggaccttttgcaatcctggagcaaacagcaaacactgtaccagaatgaacattgaactttggactatacctgaggggtgaggtaaacaacaggactataaatggcccgggaggcgccctttggaccttttgcaatcctggcgcactgaacccttgacccctgccctgcagcccccgcagcttgctgtttgcccactctatttgcccagccccagccctggagagtcctttagcagggcaaagtgcaacataggcagaccttaagggatgactcagtaacagataagctttgtgtgcctgcagggcatataaaacaggggcaaggcacagactcatagcagagcaatcaccaccaagcctggaataactgcagccacc

SEQ ID NO: 386 - DNA, 433 bp, Artificial Sequence
  Description of Artificial Sequence: Synthetic polynucleotide
aggttaatttttaaaaagcagtcaaaagtccaagtggcccttggcagcatttactctctctgtttgctctggttaataatctcaggagcacaaacattcctgtaccagaatgaacattgaactttggactatacctgaggggtgaggtaaacaacaggactataaatggcccgggaggcgccctttggaccttttgcaatcctggcgctcttttgttttacatgaagggtctggcagccaaagcaatcactcaaagttcaaaccttatcattttttgctttgttcctcttggccttggttttgtacatcagctttgaaaataccatcccagggttaatgctggggttaatttataactaagagtgctctagttttgcaatacaggacatgctataaaaatggaaagatgttgctttctgagagatgcgccacc

SEQ ID NO: 387 - DNA, 389 bp, Artificial Sequence
  Description of Artificial Sequence: Synthetic polynucleotide
aagcaaatatttgtggttatggattaactcgaactgtttgcccactctatttgccctgtaccagaatgaacattgaactttggactatacctgaggggtgaggtaaacaacaggactataaatggcccgggaggcgccctttggaccttttgcaatcctggcgctcttttgttttacatgaagggtctggcagccaaagcaatcactcaaagttcaaaccttatcattttttgctttgttcctcttggccttggttttgtacatcagctttgaaaataccatcccagggttaatgctggggttaatttataactaagagtgctctagttttgcaatacaggacatgctataaaaatggaaagatgttgctttctgagagatgcgccacc

SEQ ID NO: 388 - DNA, 378 bp, Artificial Sequence
  Description of Artificial Sequence: Synthetic polynucleotide
ggcgccctttggaccttttgcaatcctggagcaaacagcaaacactgtaccagaatgaacattgaactttggactatacctgaggggtgaggtaaacaacaggactataaatggcccgggaggcgccctttggaccttttgcaatcctggcgctcttttgttttacatgaagggtctggcagccaaagcaatcactcaaagttcaaaccttatcattttttgctttgttcctcttggccttggttttgtacatcagctttgaaaataccatcccagggttaatgctggggttaatttataactaagagtgctctagttttgcaatacaggacatgctataaaaatggaaagatgttgctttctgagagatgcgccacc

SEQ ID NO: 389 - DNA, 611 bp, Artificial Sequence; identical to SEQ ID NO: 376
  Description of Artificial Sequence: Synthetic polynucleotide

SEQ ID NO: 390 - DNA, 580 bp, Artificial Sequence; identical to SEQ ID NO: 377
  Description of Artificial Sequence: Synthetic polynucleotide

SEQ ID NO: 391 - DNA, 410 bp, Artificial Sequence; identical to SEQ ID NO: 378
  Description of Artificial Sequence: Synthetic polynucleotide

SEQ ID NO: 392 - DNA, 512 bp, Artificial Sequence; identical to SEQ ID NO: 379
  Description of Artificial Sequence: Synthetic polynucleotide

SEQ ID NO: 393 - DNA, 345 bp, Artificial Sequence; identical to SEQ ID NO: 380
  Description of Artificial Sequence: Synthetic polynucleotide

SEQ ID NO: 394 - DNA, 381 bp, Artificial Sequence; identical to SEQ ID NO: 94
  Description of Artificial Sequence: Synthetic polynucleotide

SEQ ID NO: 395 - DNA, 337 bp, Artificial Sequence; identical to SEQ ID NO: 381
  Description of Artificial Sequence: Synthetic polynucleotide

SEQ ID NO: 396 - DNA, 326 bp, Artificial Sequence; identical to SEQ ID NO: 382
  Description of Artificial Sequence: Synthetic polynucleotide

SEQ ID NO: 397 - DNA, 442 bp, Artificial Sequence; identical to SEQ ID NO: 383
  Description of Artificial Sequence: Synthetic polynucleotide

SEQ ID NO: 398 - DNA, 398 bp, Artificial Sequence; identical to SEQ ID NO: 384
  Description of Artificial Sequence: Synthetic polynucleotide

SEQ ID NO: 399 - DNA, 387 bp, Artificial Sequence; identical to SEQ ID NO: 385
  Description of Artificial Sequence: Synthetic polynucleotide

SEQ ID NO: 400 - DNA, 433 bp, Artificial Sequence; identical to SEQ ID NO: 386
  Description of Artificial Sequence: Synthetic polynucleotide

SEQ ID NO: 401 - DNA, 389 bp, Artificial Sequence; identical to SEQ ID NO: 387
  Description of Artificial Sequence: Synthetic polynucleotide

SEQ ID NO: 402 - DNA, 378 bp, Artificial Sequence; identical to SEQ ID NO: 388
  Description of Artificial Sequence: Synthetic polynucleotide

SEQ ID NO: 403 - DNA, 203 bp, Artificial Sequence
  Description of Artificial Sequence: Synthetic polynucleotide
aggttaatttttaaaaagcagtcaaaagtccaagtggcccttggcagcatttactctctctgtttgctctggttaataatctcaggagcacaaacattccagtcatatgtttgctcactgaaggttactagttaacaggcatcccttaaacaggatataaaaggacttcagcaggactgctcgaaacatcccactcagccacc

SEQ ID NO: 404 - DNA, 222 bp, Artificial Sequence
  Description of Artificial Sequence: Synthetic polynucleotide
aggttaatttttaaaaagcagtcaaaagtccaagtggcccttggcagcatttactctctctgtttgctctggttaataatctcaggagcacaaacattcctgtaccggcccgggaggcgccctttggaccttttgcaatcctggcggggcatataaaacaggggcaaggcacagactcatagcagagcaatcaccaccaagcctggaataactgcagccacc

SEQ ID NO: 405 - DNA, 275 bp, Artificial Sequence
  Description of Artificial Sequence: Synthetic polynucleotide
tgctctctgacaaagatacggtgggtcccactgatgaactgtgctgccacagtaaatgtagccactatgcctatctccattctgaagatgtgccctgttcaaacatgtcctaatactctgtctctgcaagggtcatcagtagttttccatcttactcaacatcctcccagtgagtcatatgtttgctcactgaaggttactagttaacaggcatcccttaaacaggatataaaaggacttcagcaggactgctcgaaacatcccactcagccacc

SEQ ID NO: 406 - DNA, 283 bp, Artificial Sequence
  Description of Artificial Sequence: Synthetic polynucleotide
cctccccgtgttcctgctctttgtccctctgtcctacttagactaatatttgccttgggtactgcaaacaggaaatgggggagggacaggagtagggcggccctgttcaaacatgtcctaatactctgtctctgcaagggtcatcagtagttttccatcttactcaacatcctcccagtgagtcatatgtttgctcactgaaggttactagttaacaggcatcccttaaacaggatataaaaggacttcagcaggactgctcgaaacatcccactcagccacc

SEQ ID NO: 407 - DNA, 262 bp, Artificial Sequence
  Description of Artificial Sequence: Synthetic polynucleotide
ccgcccccactgaacccttgacccctgccctgcagcccccgcagcttgctgtttgcccactctatttgcccagccccagccctgttcaaacatgtcctaatactctgtctctgcaagggtcatcagtagttttccatcttactcaacatcctcccagtgagtcatatgtttgctcactgaaggttactagttaacaggcatcccttaaacaggatataaaaggacttcagcaggactgctcgaaacatcccactcagccacc

SEQ ID NO: 408 - DNA, 268 bp, Artificial Sequence
  Description of Artificial Sequence: Synthetic polynucleotide
aagctttctgaacagccaaacagagattccaaagttcaggcaccaaagttcagaccctaacagttatttacaagggtcagttaacccctgttcaaacatgtcctaatactctgtctctgcaagggtcatcagtagttttccatcttactcaacatcctcccagtgagtcatatgtttgctcactgaaggttactagttaacaggcatcccttaaacaggatataaaaggacttcagcaggactgctcgaaacatcccactcagccacc

SEQ ID NO: 409 - DNA, 389 bp, Artificial Sequence; identical to SEQ ID NO: 387
  Description of Artificial Sequence: Synthetic polynucleotide

SEQ ID NO: 410 - DNA, 378 bp, Artificial Sequence; identical to SEQ ID NO: 388
  Description of Artificial Sequence: Synthetic polynucleotide

SEQ ID NO: 411 - DNA, 203 bp, Artificial Sequence; identical to SEQ ID NO: 403
  Description of Artificial Sequence: Synthetic polynucleotide

SEQ ID NO: 412 - DNA, 222 bp, Artificial Sequence; identical to SEQ ID NO: 404
  Description of Artificial Sequence: Synthetic polynucleotide

SEQ ID NO: 413 - DNA, 275 bp, Artificial Sequence; identical to SEQ ID NO: 405
  Description of Artificial Sequence: Synthetic polynucleotide

SEQ ID NO: 414 - DNA, 283 bp, Artificial Sequence; identical to SEQ ID NO: 406
  Description of Artificial Sequence: Synthetic polynucleotide

SEQ ID NO: 415 - DNA, 262 bp, Artificial Sequence; identical to SEQ ID NO: 407
  Description of Artificial Sequence: Synthetic polynucleotide

SEQ ID NO: 416 - DNA, 268 bp, Artificial Sequence; identical to SEQ ID NO: 408
  Description of Artificial Sequence: Synthetic polynucleotide

SEQ ID NO: 417 - DNA, 422 bp, Artificial Sequence
  Description of Artificial Sequence: Synthetic polynucleotide
aggttaatttttaaaaagcagtcaaaagtccaagtggcccttggcagcatttactctctctgtttgctctggttaataatctcaggagcacaaacattccggcccgggaggcgccctttggaccttttgcaatcctggcgccgatgacctaatgattctgagcttggcaaaggtcttatctcccagctcgcccaggcccagtgttccaggaatgtgacctttgctgcagcagccgctggagggggcagaggggatgggctggaggttgagcaaacagagcagcagaaaaggcagttcctcttctccagtgccctccttccctgtctctgcctctccctcccttcctcaggcatcagagcggagacttcagggagaccagagcccagcttgccaggcactgagctagaagccctgccgccacc

SEQ ID NO: 418 - DNA, 176 bp, Artificial Sequence
  Description of Artificial Sequence: Synthetic polynucleotide
aggttaatttttaaaaagcagtcaaaagtccaagtggcccttggcagcatttactctctctgtttgctctggttaataatctcaggagcacaaacattccgggcatataaaacaggggcaaggcacagactcatagcagagcaatcaccaccaagcctggaataactgcagccacc

SEQ ID NO: 419 - DNA, 309 bp, Artificial Sequence
  Description of Artificial Sequence: Synthetic polynucleotide
aggttaatttttaaaaagcagtcaaaagtccaagtggcccttggcagcatttactctctctgtttgctctggttaataatctcaggagcacaaacattcctgtaccggcccgggaggcgccctttggaccttttgcaatcctggcgccctggagagtcctttagcagggcaaagtgcaacataggcagaccttaagggatgactcagtaacagataagctttgtgtgcctgcagggcatataaaacaggggcaaggcacagactcatagcagagcaatcaccaccaagcctggaataactgcagccacc

SEQ ID NO: 420 - DNA, 341 bp, Artificial Sequence
  Description of Artificial Sequence: Synthetic polynucleotide
aggttaatttttaaaaagcagtcaaaagtccaagtggcccttggcagcatttactctctctgtttgctctggttaataatctcaggagcacaaacattcctgtacccactgaacccttgacccctgccctgcagcccccgcagcttgctgtttgcccactctatttgcccagccccagccctggagagtcctttagcagggcaaagtgcaacataggcagaccttaagggatgactcagtaacagataagctttgtgtgcctgcagggcatataaaacaggggcaaggcacagactcatagcagagcaatcaccaccaagcctggaataactgcagccacc

SEQ ID NO: 421 - DNA, 545 bp, Artificial Sequence
  Description of Artificial Sequence: Synthetic polynucleotide
caggctttcactttctcgccaacttacaaggcctttctgtgtaaacaatacctgaacctttaccccgttgcccggcaacggccaggtctgtgccaagtgtttgaggttaatttttaaaaagcagtcaaaagtccaagtggcccttggcagcatttactctctctgtttgctctggttaataatctcaggagcacaaacattcctgtaccagaatgaacattgaactttggactatacctgaggggtgaggtaaacaacaggactataaatggcccgggaggcgccctttggaccttttgcaatcctggcgcactgaacccttgacccctgccctgcagcccccgcagcttgctgtttgcccactctatttgcccagccccagccctggagagtcctttagcagggcaaagtgcaacataggcagaccttaagggatgactcagtaacagataagctttgtgtgcctgcagggcatataaaacaggggcaaggcacagactcatagcagagcaatcaccaccaagcctggaataactgcagccacc

SEQ ID NO: 422 - DNA, 137 bp, Artificial Sequence
  Description of Artificial Sequence: Synthetic polynucleotide
agaatgaacattgaactttggactatacctgaggggtgaggtaaacaacaggactataaatgggcatataaaacaggggcaaggcacagactcatagcagagcaatcaccaccaagcctggaataactgcagccacc

SEQ ID NO: 423 - DNA, 440 bp, Artificial Sequence
  Description of Artificial Sequence: Synthetic polynucleotide
caggctttcactttctcgccaacttacaaggcctttctgtgtaaacaatacctgaacctttaccccgttgcccggcaacggccaggtctgtgccaagtgtttgaagcaaatatttgtggttatggattaactcgaactgtttgcccactctatttgccctgtaccggcccgggaggcgccctttggaccttttgcaatcctggcgcactgaacccttgacccctgccctgcagcccccgcagcttgctgtttgcccactctatttgcccagccccagccctggagagtcctttagcagggcaaagtgcaacataggcagaccttaagggatgactcagtaacagataagctttgtgtgcctgcagggcatataaaacaggggcaaggcacagactcatagcagagcaatcaccaccaagcctggaataactgcagccacc

SEQ ID NO: 424 - DNA, 501 bp, Artificial Sequence
  Description of Artificial Sequence: Synthetic polynucleotide
caggctttcactttctcgccaacttacaaggcctttctgtgtaaacaatacctgaacctttaccccgttgcccggcaacggccaggtctgtgccaagtgtttgaagcaaatatttgtggttatggattaactcgaactgtttgcccactctatttgccctgtaccagaatgaacattgaactttggactatacctgaggggtgaggtaaacaacaggactataaatggcccgggaggcgccctttggaccttttgcaatcctggcgcactgaacccttgacccctgccctgcagcccccgcagcttgctgtttgcccactctatttgcccagccccagccctggagagtcctttagcagggcaaagtgcaacataggcagaccttaagggatgactcagtaacagataagctttgtgtgcctgcagggcatataaaacaggggcaaggcacagactcatagcagagcaatcaccaccaagcctggaataactgcagccacc

SEQ ID NO: 425 - DNA, 414 bp, Artificial Sequence
  Description of Artificial Sequence: Synthetic polynucleotide
caggctttcactttctcgccaacttacaaggcctttctgtgtaaacaatacctgaacctttaccccgttgcccggcaacggccaggtctgtgccaagtgtttgaagcaaatatttgtggttatggattaactcgaactgtttgcccactctatttgccctgtaccagaatgaacattgaactttggactatacctgaggggtgaggtaaacaacaggactataaatggcccgggaggcgccctttggaccttttgcaatcctggcgcactgaacccttgacccctgccctgcagcccccgcagcttgctgtttgcccactctatttgcccagccccaggggcatataaaacaggggcaaggcacagactcatagcagagcaatcaccaccaagcctggaataactgcagccacc

SEQ ID NO: 426 - DNA, 243 bp, Artificial Sequence
  Description of Artificial Sequence: Synthetic polynucleotide
aggttaatttttaaaaagcagtcaaaagtccaagtggcccttggcagcatttactctctctgtttgctctggttaataatctcaggagcacaaacattccggcccgggaggcgccctttggaccttttgcaatcctggcgagtcatatgtttgctcactgaaggttactagttaacaggcatcccttaaacaggatataaaaggacttcagcaggactgctcgaaacatcccactcagccacc

SEQ ID NO: 427 - DNA, 279 bp, Artificial Sequence
  Description of Artificial Sequence: Synthetic polynucleotide
aggttaatttttaaaaagcagtcaaaagtccaagtggcccttggcagcatttactctctctgtttgctctggttaataatctcaggagcacaaacattcccaggctttcactttctcgccaacttacaaggcctttctgtgtaaacaatacctgaacctttaccccgttgcccggcaacggccaggtctgtgccaagtgtttggggcatataaaacaggggcaaggcacagactcatagcagagcaatcaccaccaagcctggaataactgcagccacc

SEQ ID NO: 428 - DNA, 256 bp, Artificial Sequence
  Description of Artificial Sequence: Synthetic polynucleotide
aggttaatttttaaaaagcagtcaaaagtccaagtggcccttggcagcatttactctctctgtttgctctggttaataatctcaggagcacaaacattccccctgttcaaacatgtcctaatactctgtctctgcaagggtcatcagtagttttccatcttactcaacatcctcccagtggggcatataaaacaggggcaaggcacagactcatagcagagcaatcaccaccaagcctggaataactgcagccacc

SEQ ID NO: 429 - DNA, 183 bp, Artificial Sequence
  Description of Artificial Sequence: Synthetic polynucleotide
ccctgttcaaacatgtcctaatactctgtctctgcaagggtcatcagtagttttccatcttactcaacatcctcccagtgagtcatatgtttgctcactgaaggttactagttaacaggcatcccttaaacaggatataaaaggacttcagcaggactgctcgaaacatcccactcagccacc

SEQ ID NO: 430 - DNA, 249 bp, Artificial Sequence
  Description of Artificial Sequence: Synthetic polynucleotide
aggttaatttttaaaaagcagtcaaaagtccaagtggcccttggcagcatttactctctctgtttgctctggttaataatctcaggagcacaaacattcctgtaccggcccgggaggcgccctttggaccttttgcaatcctggcgagtcatatgtttgctcactgaaggttactagttaacaggcatcccttaaacaggatataaaaggacttcagcaggactgctcgaaacatcccactcagccacc

SEQ ID NO: 431 - DNA, 349 bp, Artificial Sequence; identical to SEQ ID NO: 12
  Description of Artificial Sequence: Synthetic polynucleotide

SEQ ID NO: 432 - DNA, 558 bp, Artificial Sequence
  Description of Artificial Sequence: Synthetic polynucleotide
ccctaaaatgggcaaacattgcaagcagcaaacagcaaacacacagccctccctgcctgctgaccttggagctggggcagaggtcagagacctctctgggcccatgccacctccaacatccactcgaccccttggaatttcggtggagaggagcagaggttgtcctggcgtggtttaggtagtgtgagaggggaatgactcctttcggtaagtgcagtggaagctgtacactgcccaggcaaagcgtccgggcagcgtaggcgggcgactcagatcccagccagtggacttagcccctgtttgctcctccgataactggggtgaccttggttaatattcaccagcagcctcccccgttgcccctctggatccactgcttaaatacggacgaggacagggccctgtctcctcagcttcaggcaccaccactgacctgggacagtgaatccggactctaaggtaaatataaaatttttaagtgtataatgtgttaaactactgattctaattgtttctctcttttagattccaacctttggaactgaattctagaccacc

SEQ ID NO: 433 - DNA, 580 bp, Artificial Sequence
  Description of Artificial Sequence: Synthetic polynucleotide
atagtaatcaattacggggtcattagttcatagcccatatatggagttccgcgttacataacttacggtaaatggcccgcctggctgaccgcccaacgacccccgcccattgacgtcaataatgacgtatgttcccatagtaacgccaatagggactttccattgacgtcaatgggtggagtatttacggtaaactgcccacttggcagtacatcaagtgtatcatatgccaagtacgccccctattgacgtcaatgacggtaaatggcccgcctggcattatgcccagtacatgaccttatgggactttcctacttggcagtacatctacgtattagtcatcgctattaccatggtgatgcggttttggcagtacatcaatgggcgtggatagcggtttgactcacggggatttccaagtctccaccccattgacgtcaatgggagtttgttttggcaccaaaatcaacgggactttccaaaatgtcgtaacaactccgccccattgacgcaaatgggcggtaggcgtgtacggtgggaggtctatataagcagagctggtttagtgaaccgtcagatc

SEQ ID NO: 434 - DNA, 1775 bp, Artificial Sequence
  Description of Artificial Sequence: Synthetic polynucleotide
agatctgaattcggtacctagttattaatagtaatcaattacggggtcattagttcatagcccatatatggagttccgcgttacataacttacggtaaatggcccgcctggctgaccgcccaacgacccccgcccattgacgtcaataatgacgtatgttcccatagtaacgccaatagggactttccattgacgtcaatgggtggagtatttacggtaaactgcccacttggcagtacatcaagtgtatcatatgccaagtacgccccctattgacgtcaatgacggtaaatggcccgcctggcattatgcccagtacatgaccttatgggactttcctacttggcagtacatctacgtattagtcatcgctattaccatggtcgaggtgagccccacgttctgcttcactctccccatctcccccccctccccacccccaattttgtatttatttattttttaattattttgtgcagcgatgggggcggggggggggggggggcgcgcgccaggcggggcggggcggggcgaggggcggggcggggcgaggcggagaggtgcggcggcagccaatcagagcggcgcgctccgaaagtttccttttatggcgaggcggcggcggcggcggccctataaaaagcgaagcgcgcggcgggcgggagtcgctgcgcgctgccttcgccccgtgccccgctccgccgccgcctcgcgccgcccgccccggctctgactgaccgcgttactcccacaggtgagcgggcgggacggcccttctcctccgggctgtaattagcgcttggtttaatgacggcttgtttcttttctgtggctgcgtgaaagccttgaggggctccgggagggccctttgtgcggggggagcggctcggggggtgcgtgcgtgtgtgtgtgcgtggggagcgccgcgtgcggctccgcgctgcccggcggctgtgagcgctgcgggcgcggcgcggggctttgtgcgctccgcagtgtgcgcgaggggagcgcggccgggggcggtgccccgcggtgcggggggggctgcgaggggaacaaaggctgcgtgcggggtgtgtgcgtgggggggtgagcagggggtgtgggcgcgtcggtcgggctgcaaccccccctgcacccccctccccgagttgctgagcacggcccggcttcgggtgcggggctccgtacggggcgtggcgcggggctcgccgtgccgggcggggggtggcggcaggtgggggtgccgggcggggcggggccgcctcgggccggggagggctcgggggaggggcgcggcggcccccggagcgccggcggctgtcgaggcgcggcgagccgcagccattgccttttatggtaatcgtgcgagagggcgcagggacttcctttgtcccaaatctgtgcggagccgaaatctgggaggcgccgccgcaccccctctagcgggcgcggggcgaagcggtgcggcgccggcaggaaggaaatgggcggggagggccttcgtgcgtcgccgcgccgccgtccccttctccctctccagcctcggggctgtccgcggggggacggctgccttcgggggggacggggcagggcggggttcggcttctggcgtgtgaccggcggctctagagcctctgctaaccatgttcatgccttcttctttttcctacagctcctgggcaacgtgctggttattgtgctgtctcatcattttggcaaagaattcctcgaagatctaggcaacgcgtctcgaggcggccgccgccacc

SEQ ID NO: 435 - DNA, 890 bp, Artificial Sequence
  Description of Artificial Sequence: Synthetic polynucleotide
aggttaatttttaaaaagcagtcaaaagtccaagtggcccttggcagcatttactctctctgtttgctctggttaataatctcaggagcacaaacattccagatccaggttaatttttaaaaagcagtcaaaagtccaagtggcccttggcagcatttactctctctgtttgctctggttaataatctcaggagcacaaacattccagatccggcgcgccagggctggaagctacctttgacatcatttcctctgcgaatgcatgtataatttctacagaacctattagaaaggatcacccagcctctgcttttgtacaactttcccttaaaaaactgccaattccactgctgtttggcccaatagtgagaactttttcctgctgcctcttggtgcttttgcctatggcccctattctgcctgctgaagacactcttgccagcatggacttaaacccctccagctctgacaatcctctttctcttttgttttacatgaagggtctggcagccaaagcaatcactcaaagttcaaaccttatcattttttgctttgttcctcttggccttggttttgtacatcagctttgaaaataccatcccagggttaatgctggggttaatttataactaagagtgctctagttttgcaatacaggacatgctataaaaatggaaagatgttgctttctgagagactgcagaagttggtcgtgaggcactgggcaggtaagtatcaaggttacaagacaggtttaaggagaccaatagaaactgggcttgtcgagacagagaagactcttgcgtttctgataggcacctattggtcttactgacatccactttgcctttctctccacagggcaatccggtactgttggtaaagccacc

SEQ ID NO: 436-437 - skipped (2 entries)

SEQ ID NO: 438 - DNA, 290 bp, Artificial Sequence
  Description of Artificial Sequence: Synthetic polynucleotide
tcagatcgcctggagacgccatccacgctgttttgacctccatagaagacaccgggaccgatccagcctccgcggccgggaacggtgcattggaacgcggattccccgtgccaagagtgacgtaagtaccgcctatagactctataggcacacccctttggctcttatgcatgaacggtggagggcagtgtagtctgagcagtactcgttgctgccgcgcgcgccaccagacataatagctgacagactaacagactgttcctttccatgggtcttttctgcaggccacc

SEQ ID NO: 439 - DNA, 12 bp, Artificial Sequence
  Description of Artificial Sequence: Synthetic oligonucleotide
tgataactcgag

SEQ ID NO: 440 - DNA, 9817 bp, Artificial Sequence
  Description of Artificial Sequence: Synthetic polynucleotide
ctgcgcgctcgctcgctcactgaggccgcccgggcaaagcccgggcgtcgggcgacctttggtcgcccggcctcagtgagcgagcgagcgcgcagagagggagtggccaactccatcactaggggttcctggaggggtggagtcgtgacgtgaattacgtcatagggttagggaggtcggccgctctaggagttaatttttaaaaagcagtcaaaagtccaagtgcccttgcgagcatttactctctctgtttgctctggttaataatctcaggagcacaaacattccttactagttctaggagttaatttttaaaaagcagtcaaaagtccaagtgcccttgcgagcatttactctctctgtttgctctggttaataatctcaggagcacaaacattccttactagttctagagcggccgccagtgtgctggaattcggcttttttagggctggaagctacctttgacatcatttcctctgcgaatgcatgtataatttctacagaacctattagaaaggatcacccagcctctgcttttgtacaactttcccttaaaaaactgccaatcccactgctgtttggcccaatagtgagaactttttcctgctgcctcttggtgcttttgcctatggcccctattctgcctgctgaagacactcttgccagcatggacttaaacccctccagctctgacaatcctctttctcttttgttttacatgaagggtctggcagccaaagcaatcactcaaagttcaaaccttatcattttttgctttgttcctcttggccttggttttgtacatcagctttgaaaataccatcccagggttaatgctggggttaatttataactgagagtgctctagttctgcaatacaggacatgctataaaaatggaaagatgttgctttctgagagatcagcttacatgtgctagcgtagccaaccatgggagtgaggcacccgccctgctcccaccggctcctggccgtctgcgccctcgtgtccttggcaaccgctgcactcctggggcacatcctactccatgatttcctgctggttccccgagagctgagtggctcctccccagtcctggaggagactcacccagctcaccagcagggagccagcagaccagggccccgggacgcccaggcacaccccggccgtcccagagcagtgcccacacagtgcgacgtcccccccaacagccgcttcgattgcgcccctgacaaggccatcacccaggaacagtgcgaggcccgcggctgctgctacatccctgcaaagcaggggctgcagggagcccagatggggcagccctggtgcttcttcccacccagctaccccagctacaagctggagaacctgagctcctctgaaatgggctacacggccaccctgacccgtaccacccccaccttcttccccaaggacatcctgaccctgcggctggacgtgatgatggagactgagaaccgcctccacttcacgatcaaagatccagctaacaggcgctacgaggtgcccttggagaccccgcgtgtccacagccgggcaccgtccccactctacagcgtggagttctccgaggagcccttcggggtgatcgtgcaccggcagctggacggccgcgtgctgctgaacacgacggtggcgcccctgttctttgcggaccagttccttcagctgtccacctcgctgccctcgcagtatatcacaggcctcgccgagcacctcagtcccctgatgctcagcaccagctggaccaggatcaccctgtggaaccgggaccttgcgcccacgcccggtgcgaacctctacgggtctcaccctttctacctggcgctggaggacggcgggtcggcacacggggtgttcctgctaaacagcaacgccatggacgtggtcctgcagccgagccctgcccttagctggaggtcgacaggtgggatcctggacgtctacatcttcctgggcccagagcccaagagcgtggtgcagcagtacctggacgtggtgggatacccgttcatgccgccatactggggcctgggcttccacctgtgccgctggggctactcctccaccgctatcacccgccaggtggtggagaacatgaccagggcccacttccccctggacgtccagtggaacgatctggactacatggactcccggagggacttcacgttcaacaaggatggcttccgggacttcccggccatggtgcaggagctgcaccagggcggccggcgctacatgatgatcgtggatcctgccatcagcagctcgggccctgccgggagctacaggccctacgacgagggtctgcggaggggggttttcatcaccaacgagaccggccagccgctgattgggaaggtgtggcccgggtccactgccttccccgacttcaccaaccccacagccctggcctggtgggaggacatggtggctgagttccatgaccaggtgcccttcgacggcatgtggattgacatgaacgagccttccaacttcatcagaggctctgaggacggctgccccaacaacgagctggagaacccaccctacgtgcctggggtggttggggggaccctccaggcggccaccatctgtgcctccagccaccagtttctctccacacactacaacctgcacaacctctacggcctgaccgaagccatcgcctcccacagggcgctggtgaaggctcgggggacacgcccatttgtgatctcccgctcgacctttgctggccacggccgatacgccggccactggacgggggacgtgtggagctcctgggagcagctcgcctcctccgtgccagaaatcctgcagtttaacctgctgggggtgcctctggtcggggccgacgtctgcggcttcctgggcaacacctcagaggagctgtgtgtgcgctggacccagctgggggccttctaccccttcatgcggaaccacaacagcctgctcagtctgccccaggagccgtacagcttcagcgagccggcccagcaggccatgaggaaggccctcaccctgcgctacgcactcctcccccacctctacacactgttccaccaggcccacgtcgcgggggagaccgtggcccggcccctcttcctggagttccccaaggactctagcacctggactgtggaccaccagctcctgtggggggaggccctgctcatcaccccagtgctccaggccgggaaggccgaagtgactggctacttccccttgggcacatggtacgacctgcagacggtgccaatagaggcccttggcagcctcccacccccacctgcagctccccgtgagccagccatccacagcgaggggcagtgggtgacgctgccggcccccctggacaccatcaacgtgcacctccgggctgggtacatcatccccctgcagggccctggcctcacaaccacagagtcccgccagcagcccatggccctggctgtggccctgaccaagggtggagaggcccgaggggagctgttctgggacgacggagagagcctggaagtgctggagcgaggggcctacacacaggtcatcttcctggccaggaataacacgatcgtgaatgagctggtacgtgtgaccagtgagggagctggcctgcagctgcagaaggtgactgtcctgggcgtggccacggcgccccagcaggtcctctccaacggtgtccctgtctccaacttcacctacagccccgacaccaaggtcctggacatctgtgtctcgctgttgatgggagagcagtttctcgtcagctggtgttgataactcgagccgggcggagtgtgttagtctctccagagggaggctggttccccagggaagcagagcctgtgtgcgggcagcagctgtgtgcgggcctgggggttgttaagtgcaattatttttaataaaaggggcatttggaaaaaaaaaaaaaaggtagcagtcgacagatgaattctgcagatctgtggcttctagctgcccgggtggcatccctgtgacccctccccagtgcctctcctggccctggaagttgccactccagtgcccaccagccttgtcctaataaaattaagttgcatcattttgtctgactaggtgtccttctataatattatggggtggaggggggtggtatggagcaaggggcaagttgggaagacaacctgagttgttgggattccaggcatcgagtagataagtagcatggcgggttaatcattaactacaaggaacccctagtgatggagttggccactccctctctgcgcgctcgctcgctcactgaggccgggcgaccaaaggtcgcccgacgcccgggctttgcccgggcggcctcagtgagcgagcgagcgcgcagagagggacagatccgaagccgggcaaatcagcgcctggcagcagtggcgtctggcggaaaacctcagtgtgacgctccccgccgcgtcccacgcttgttcccggatctgaccaccagcgaaatccgatttttgcaccgagctgggtaataagcgttggcaatttaaccgccagtcaggctttctttcacagtgtggattggcgataaaaaacaactgctgacgccgctgcgcgatcagttcacccgttcaccgctggataacgacttggcgtaagtgaagcgacccgtaagaccctaacgcctgggtcgaacgctggaaggcggcgggccaaaccaggccgaagcagcgttgttgcagttcacggcagatacacttgctgttgcggtgctgattacgaccgctcactcgtggcagcaacaggggaaaaccttatttatcagccggaaaacctaccggattgttggtagtggtcaataggcgattaccgttgtgttgaagtggcgagcgatacaccgcttccggcgcggattggcctgaactgccaactggcgcaggtagcagagcgggtaaactggctcggattagggccgcaagaaaactatcccgaccgccttactgccgcctgttttgaccgctgggatctgccaagtcagacagtatagcccgtacgtcttcccgagcgaaaacggtctgcgctgcgggacgcgcgaattgaatttggcccacaccagtggcgcggcgacttccagttcaatatcagccgctacagtgaacagcaactgttggaaaccagccttcgccaactgctgcacgcggaagaaggcactggctgaatatcgacggtttccagttggggattggtggcgacgactcctggagcccgtcagtatcggcggacttccaactgagcgccggtcgctaccttaccagttggtctggtgtcaaaaagcgtccgcttgagtctagcgatcgcgcgcagatctgtcatgtgagcaaaaggccagcaaaaggccaggaaccgtaaaaaggccgcgttgctggcgtttttccataggctccgcccccctgacgagcatcacaaaaatcgacgctcaagtcagaggtggcgaaacccgacaggactataaagataccaggcgtttccccctggaagctccctcgtgcgctctcctgttccgaccctgccgcttaccggatacctgtccgcctttctcccttcgggaagcgtggcgctttctcatagctcacgctgtaggtatctcagttcggtgtaggtcgttcgctccaagctgggctgtgtgcacgaaccccccgttcagcccgaccgctgcgccttatccggtaactatcgtcttgagtccaacccggtaagacacgacttatcgccactggcagcagccactggtaacaggattagcagagcgaggtatgtaggcggtgctacagagttcttgaagtggtggcctaactacggctacactagaagaacagtatttggtatctgcgctctgctgaagccagttaccttcggaaaaagagttggtagctcttgatccggcaaacaaaccaccgctggtagcggtggtttttttgtttgcaagcagcagattacgcgcagaaaaaaaggatctcaagaagatcctttgatcttttctacggggtctgacgctcagtggaacgaaaactcacgttaagggattttggtcatgagattatcaaaaaggatcttcacctagatccttttcacgtagaaagccagtccgcagaaacggtgctgaccccggatgaatgtcagctactgggctatctggacaagggaaaacgcaagcgcaaagagaaagcaggtagcttgcagtgggcttacatggcgatagctagactgggcggttttatggacagcaagcgaaccggaattgccagctggggcgccctctggtaaggttgggaagccctgcaaagtaaactggatggctttcttgccgccaaggatctgatggcgcaggggatcaagatctgatcaagagacaggatgaggatcgtttcgcatgattgaacaagatggattgcacgcaggttctccggccgcttgggtggagaggctattcggctatgactgggcacaacagacaatcggctgctctgatgccgccgtgttccggctgtcagcgcaggggcgcccggttctttttgtcaagaccgacctgtccggtgccctgaatgaactgcaagacgaggcagcgcggctatcgtggctggccacgacgggcgttccttgcgcagctgtgctcgacgttgtcactgaagcgggaagggactggctgctattgggcgaagtgccggggcaggatctcctgtcatctcaccttgctcctgccgagaaagtatccatcatggctgatgcaatgcggcggctgcatacgcttgatccggctacctgcccattcgaccaccaagcgaaacatcgcatcgagcgagcacgtactcggatggaagccggtcttgtcgatcaggatgatctggacgaagagcatcaggggctcgcgccagccgaactgttcgccaggctcaaggcgagcatgcccgacggcgaggatctcgtcgtgacccatggcgatgcctgcttgccgaatatcatggtggaaaatggccgcttttctggattcatcgactgtggccggctgggtgtggcggaccgctatcaggacatagcgttggctacccgtgatattgctgaagagcttggcggcgaatgggctgaccgcttcctcgtgctttacggtatcgccgctcccgattcgcagcgcatcgccttctatcgccttcttgacgagttcttctgaatttaaagcccaatacgcaaaccgcctctccccgcgcgttggccgaagcggttcaatattttgttaaaattcgcgttaaatttttgttaaatcagctattttttaaccaataggccgaaatcggcaaaatcccttgtaaatcaaaagaatagaccgagatagggttgagtgttgttccagtttggaacaagagtccactattaaagaacgtggactccaacgtcaaagggcgaaaaaccgtctatcagggcgttggcccactacgtgaaccttcaccctaatcaagttttttggggtcgaggtgccgtaaagcactaaatcggaaccctaaagggagcccccgatttagagcttgacggggaaaccggcgaacgtggcgagaaaggaagggaagaaagcgaaaggagcgggcgctagggcgctggcaagtgtagcggtcacgctgcgcgtaaccaccacacccgccgcgctaagcgccgctacagggcgcgtcccttcgccttcaggctgcgtcgagtactgtactgtgagccagagttgcccggcgctctccggctgcggtagttcaggcagttcaatcaactgtttaccttgtggagcgactccagaggcacttcaccgcttgccagcggcttacgatccagcgccacgatccagtgcaggagatcgttatcgctatacggaacaggtattcgctggtcacttcgataaggtttgcccggataaacggaactggaaaaactgctgctggtgttttgcttccgtcagtgctggatcggcgtgcggtcggcaaagaccagaccgttctaacagaactggcgattgttcggcgtatcgccaaaatcaccgccgtaagccgaccacgggttgccgttttcagcaggatttaatcagcgactgatccacccagtcccagacgaagccgccctgtaaacggggatactgacgaaacgcctgccagtatttagcgaaaccgccaagactgttacccaagcgtgggcgtattcgcaaaggatcagcgggcgcgtctctccaggtagcgaaagccttttttgatcgacctttcggcacagccgggaagggctggtcttcaaccacgcgcgcgtacaacgggcaaataatatcggtggccgtggtgtcggctccgccgccttcaactgcaccgggcgggaaggatcgacagatttgatccagcgatacagcgcgtcgtgattagcgccgtggcctgattcaattccccagcgaccagtagatcacactcgggtgattacgattgcgctgcaccagtcgcgttacggttcgctcttcgccggtagccagcgcggatcacggtcagacgattcgttggcacgatccgtgggtttcaatactggcttcaaaccaccactaacaggccgtagcggtcgcacagcgtgtaccacagcggttggttcggataatcgaacagcgcacggcgttaaagttgttctgcttcaacagcaggatattctgcaccttcgtctgctcttcctaacctgaccaagcagaggatctgctcgtgacggttaatcctcgaatcagcaacggcttgccgttcagcagcagcagaccaagttcaatccgcacctcgcggaaaccgacaacgcaggcttctgcttcaatcagcgtgccgtcggcggtgtgcagttcaaccaccgcacgatagagattcgggatttcggcgctccacagtttcgggttttcgacgttcagacgtagtgtgacgcgatctgcaaaccaccacgctcaacgataatttcaccgccgaaaggcgcggtgccgctggcgacctgcgtttcaccctgccagaaagaaactgttacccgtaggtagtcacgcaactcgccgcacactgaacttcagcctccagtacagcgcggctgaaatcgtcttaaagcgagtggcaactggaaatcgctgatttgtgtagtcggtttagcagcaacgagacttcacggaaaatccgctaatccgccacagatcctgatcttccagataactgccgtcactccaacgcagcaccttcaccgcgaggcggttttctccggcgcgtaaaaatcgctcaggtcaaattcagacggcaaacgactgtcctggccgtaaccgacccagcgcccgttgcaccacagattgaaacgccgagtttacgcctcaaaaataattcgcgtctggccttcctgtagccagctttcacaactataatagtgagcgagtaacaacccgtcggattctccgtgggaacaaacggcggattgaccgtatagggataggttacgttggtgtagtagggcgctccgtaaccgtgctactgccagtttgaggggacgacgacagtatcggcctcaggaagatcgcactccagccagctttccggcaccgcttctggtactggaaaccaggcaaagcgcctatcgcctatcaggctgcacaactgttgggaagggcgatctgtgcgggcctcttcgctattacgccagcttgcgaaagggggtagtgctgcaaggcgattaagttgggtaacgccagggttttcccagtcacgacgtggatctgggccactccctct

SEQ ID NO: 441 - DNA, 130 bp, Artificial Sequence
  Description of Artificial Sequence: Synthetic polynucleotide
ctgcgcgctcgctcgctcactgaggccgcccgggcaaagcccgggcgtcgggcgacctttggtcgcccggcctcagtgagcgagcgagcgcgcagagagggagtggccaactccatcactaggggttcct

SEQ ID NO: 442 - DNA, 130 bp, Artificial Sequence
  Description of Artificial Sequence: Synthetic polynucleotide
aggaacccctagtgatggagttggccactccctctctgcgcgctcgctcgctcactgaggccgggcgaccaaaggtcgcccgacgcccgggctttgcccgggcggcctcagtgagcgagcgagcgcgcag

SEQ ID NO: 443 - DNA, 145 bp, Artificial Sequence; identical to SEQ ID NO: 165
  Description of Artificial Sequence: Synthetic polynucleotide

SEQ ID NO: 444 - DNA, 136 bp, Artificial Sequence
  Description of Artificial Sequence: Synthetic polynucleotide
aggaacccctagtgatggagttggccactccctctctgcgcgctcgctcgctcactgaggccgggcgaccaaaggtcgcccgacgcccgggctttgcccgggcggcctcagtgagcgagcgagcgcgcagagaggg

SEQ ID NO: 445 - DNA, 18 bp, Artificial Sequence
  Description of Artificial Sequence: Synthetic primer
acgctgggctacttgatc

SEQ ID NO: 446 - DNA, 19 bp, Artificial Sequence
  Description of Artificial Sequence: Synthetic primer
cgaggaggagctattcttg

SEQ ID NO: 447 - DNA, 18 bp, Artificial Sequence
  Description of Artificial Sequence: Synthetic probe
tttcgggtcgtgctcatg
